United States Patent Application Publication US 2007/0054278 A1 - sequence listing, part 87

SEQ ID NO: 96764 - DNA, 699032 bp, Homo sapiens
  misc_feature (1)...(699032): n = A,T,C or G
aaaaatatgtgttccagccttgtctctactacttaatagcaatgtaaacataagcctcaatttagttttgaaaaggggaataggaaaatattcaatttagccatgctgatcaaatgataaaatgtatgtgaaaccattttttaaactccaaacaaaataaaaataaagtaatatttcatcattatcatttttattacatcaatgatggtagaatcactttaggtctgattaaaagtgtactcaatactttctaggttcttctcagtaccattttgcagccttgttgaaattttcctttataaacacatggagctgaaattatttggagctaaaactatagagaatcaatgttttaataccaaactaaaaattttttaaaagagaatactattagggattcttcttctttcttttctttttttcttttttatatctaggaggctgaatttttctgaattttgtaataagggagagttaaaaaccctcctaatttttcatatgggcctttctgtttaaaaacaatgatttattttgtagttcttcatggcccagacattctaatctaagtcaggtttgaaccccaactctgccatttactagtgttacagattcactagtggtatgatggacaatgcatttaatgtcactgagtcagaattttcttacttgaaagttggaataataatagcttttctgcacacggttgttatgagatataaattgaaaaataaggtgacttataatatgtgccaggttaaatgtttaattcttctcaggtttggatcactaattataattaaaggttcacgttggctttagatgagtgaaaaaatagttgactgaaaattactcaactgagttcatttgatggctggtgatcaaccatttaagcacttctattttgtaagaaggaataaaatcttaacaatttttaattaaaatattttttctgtattttcacttcctaagtagataattatgattaacttggaccttgtaacactatttacatattaaggcaagctttatttggaagaatttgttccagatgattttatttctggcaaactacattgatgaggtcccaaatatagaccatcttctaaatgtcacatctcagatggttgctaaaaatcatatttgcaaagaattctaaatgtctgggtaagctgaaattgttttgtgttactgtattcctagaagtataaaagcaaatgtctggagctttttggtggaatattaaaaaagcaatcataaatagtatatttgtgatttgttaataaacagaaaaaaagtaattagattatatttagtcatcatagaaagaatacacaagtagtgaagttccactgcccagttatggtcattgttgagtatgactgaagattattgaaaaaataataaaaagtcaacaaatattagatgttctgcaacaattacttgaaagagcattgaagttacaatccgccaggctactgtttctcagaaagggttacacatcagaactattcaggtaacatttcataatgcaaatacatgactaccacactggactgaataaactagaaactctaggagtagacttagtcatctctctctctatttttaatctccacttttgattgtgatgcagggcagattttggaaagactatggtggacaaactgggagcactttgaggatagaacctgtcatatacattctctgatctccagggaagttccttggacgtggttgaaagttgattatttatattgatgaataagtatgtcttaatcccttctgtgctgctataacagaatacttgagactgggtaatttataataaacagaaacttattttctcacagtttaagaggctgggaagtcaagatcaatacactggcgtctggagaaggtcttcttgcttgctgtgtcatcctatggaggaagggcaaagagagggcaagagaaagccaaggggaggccaaacctgtcttttgataaggagcccactcttgctataatagcattaattcattcagaaaggtagtgcccccatgacccaaacacatcacattaggttccacctcccaacaccaacacattggggatcgagttttcaatatttcaactttgggggacacattccaaccacagcagtgtatgatgtaatgtgctaaagtcctgatgtgtcttaaaatcaccggaggaagttatatcgggacaaattggtaaatataaataagtcagaaaaaaaagatcacaaagaagatatatgttcaaaaaggatgatgctaccaaaaaatatttcactgagttctcattttcagtaagaggtaataaattttttaactctttatgcattttatttttaatcttgttttacttagtaagaaaacaaagactcaaaatatttagcttaagaaatgaaaatgttagtgtacatgaatatatcttagcttaaatggatacatttatagagcagaattaaattccataactgcagagtgaccacaaagggcaaaagtgttgcaattgctattaaaaataataaaaataatagttgtgcttttggcagttagtgcaggctccaaacatctttggtagtgacagaatctcaaacaactggagtcataaaaccagcaagcttttcaatatgatctgtatgtatagatgtttacgtatatgtgcatatatagtataaataaatcacaaggcttgaaataataataaagaactatgccattgagatgtcataggtttagattattttaatttaaaatagttgataaatacacgttctgatctttcaaattcagttctcatactatatcaaatgaactgactatgcattctatgaaactgcaactcataataatagtctcttaattgtcaagacatgaaattcttgcaaaaggtagtctgcgttgctaagctttgcttctgttcttactgcagccttttatttcctgaaatctcccttcagctgccatgagttatagcctatttttatactaaccttcatctagggccctgtagatccaaagcaaatcaatttctatctgccatgcttcaaccgacattttgttttggtaaaatagggccaaatgggcatcaaatacagccttgaaggggaaatggcaggttgctgtggaggcccgttcttatatgtgcacaactgcggctttgttttgagtcatccagtcccaattcattttacttgtgtgagctcttcctttcctcttcagtgggactacctcctttcaacaaacttgacaataaaacaatctcaaattgagctttcccctatttagagctttatctttacttcgctatgcaaaattttaaggatacaactacaagactccattgtttgcttgttgtggtgaaaaggatgattggttagagagctgggtcatctattttgttttttaagtgggtgcatttgtgatttcttgacaataaaggattgggccctctcagagggatgcgcatttataacttgcaggccaccactctcccactctctatgagaaacctgacaaaatgattttggtactttttcttattgagtctcaaactctcaaaatagtgttccaggatgccaatttaccaacaagtcatcaaaagcacagcaggtaaagccaatttcccatccttggactgcacgatctctaaattatcttttaggcctgacattatatgctttctggctgcaatttttgattattccgattttgattttgtaggaaaatttcagttattcttgctaatatgaatagcacgataggcaataccaaacagtaatccaaaaacaaagtttttgtatacaaaattaactggttttagtatctgcttagttcgtgtttaataggaagtaacagtgggttggaagaaacaagattttatgctaaagcaaatgtatctactaagcaagattaatatatgacttttcattttggaatatatccttctaaatctgaagactaaaacagacaattttcctgtcatgttacatgtgacagaatataatattgaaagtaaatttttccccaaatttcaatgtttataactgtataaattttgtggtagaagtatgtaaaatattatatttacttaatttcctgtaattagtgtaatctaaagattgactccaactgtgtaccccttaaggcactttcttattttgattttaaatgctacaaaccaaaatctcttctaaaaagtgacttactacttactatttgcttatataaatcattaatggtcatatataccaaaataatgaaataaaaatttgactactctttttgcattaattcattgaaattataagtatacacttatattattttctatgaaaattgaattcatgaacatgactagaacatatgatttttgctaaaattagacctcacaatgttatggtctaagaagcatccatccaggccaggcacggtggctcacacctgtaatctcatcactttggaggccgaggcaggtggatcacaacatcaggagttccagaccagcctgaccaacatggtgaaactccgtctctactaaaaacacacaaaaaaatcagctgggcttggtggcacaggcctgtaatcccacctactcaggaggctgaggcaggagaatcacttgaacccaggatgcggaagttgctgtgagccaagatcacaccactgcactccagtctgggcaacagagggagactccatctcaaaaaaaaaaaaaaaaaaaaaaatacatccttgatgctttcacatttattggaaatcagtataatctctttcatgaggcaatgcttgaaaaatatgtctcaaataattattcattattttgcatgtattggttggcttagcattaataaattaataataataaatttatttgatgatgatatgcttatcattagtacagcacttttaagcttgcactttaaatcagccttcattaactggccagttaattatatacaagaacttaccattaagttttcctttaagtttttaaagaactatgtaaaacaatttataataaattttgaatcttaagaatgttatacctagaatgcctaaaatctaaaataaggctgaaccagttataaaatgaaaataattttttcattgatttcttcactgatttttgaacttatttttaattttttatcttcaaagtttgccattatgaaacattacctcttcactcttttttctgtgtatacaatttctttacatttacttataatttatatttgatctagttttaagtacattttgaggtatgcacatagaagagttaaagtgaaataaaaatagattgtaaccatataataggaattataaattgttgatctaggaaccagaatgagacactggctacaatgtagtatttgaaattatttgatttgaccataagctttcttactgtcaaggaaaataacaaaaacatttttgtttctccagtttatggaaaggggcaatgtcatcaagtttttagatatcagaatcattctgttttcagtggccagaaatgcttttctccaaaccttcatctttctgtttattcaccggtttacatattatctactttttgaaaccttgtattatgccttcagtagggaattatcttttctctgaattataaattgataattacaaaagtttatctaccactaattgaatatctatcatgtgagaggcaaataacagacactgttttctctaatccttgcaataatcctgcgagattcatgctattttaccctctttacagatgatgaaaccgagccaagagaagccaagtgatttgcacaaggtcgcatagataataagagcagaattcttggaataccaatagtgctttgtaatttgaggatctcctcatatcgaatgttcctttctaaaacattttcatagctatataaaaaatctgtaagctttatccatccagtgcttctcaaaaagggaaaactatgtgaaacccactgacattttgaatattactgtgctttcttgcagcctgtgaacttatgaatcaaggcatcttggccctggtcagctccattggctgcacgtcagcaggatccctccagtctttggcagacgccatgcatatcccccacctcttcattcagcgctcaacagctgggaccccaaggagtggctgtggactcacccggagcaacaggaatgatgactacactctctcagttcgcccacctgtctacttgcatgatgttatcctaagagtggtcacagagtatgcctggcagaaattcattatattctatgatagtgaatacggtaagtgtttataatttgtttaggttttgtaagctgatatttgcatgagaagcaaattcattaaatcttaaaagtttcaagggtcttactcattgttatttgtggttttcttgtcttgtcatatttttcttataaacatagcaacaactgaaaattgtgttaatgtatttaagtccaacattttggtataaagtcaactttaaatataaatacctgtacctacttaatgcttagtttacaaatgtttctagagagaatctgattccaatacatcttgatttttcaactaatgggaatttagtcataaaaacaacaccgtctttcttccctttcaaaaaaatgtatacctctctataatgcagaagatcatattggataaccctagaacactgaaaatttacctctttctattatttggctaaatgaaatctgaaaaatcttgcttacacccttgtgtagactttaatacctactcagtacttaactccttggagtcactaaaattatatcaccatacagttcatattatatgttgtctacagtaggaagtctcacaaaagtactaagtagtaaaaaaaaaattctttaatcttccaaggtaaaacacaaagcattgtccctaaatttatcataatttgagaataaaatgctttgtctcagtatatttactggtacttcattaacaactaaacaaaataatatttttgtttacatttattttttctgaatttatctaccttttttctaactgaccgatccccaatatcttaatctatagattccctcttatttgtggcagaaataaaatagagatgagtatgatcaaatgaggggaaatgaacagatcttgataaagaatgcctattttgaaacatgtgttttcttagaggttatgtcttgagaaggagtcttggaaaaatttcctgttcagtaggaatgggttcagtttttacagttttctgaaaagaaagtcagagaggatttcactctctgtagcataacttatttttctttgcaaataagtaaataaacatcttaaaaaatgctttcttgtcctaagctacccagcaatgtgaacgatattggagaacagttacacaagagtcgtccagaaagtgccatcaatagaattgagaacaaacaagttggcagaaatctaggaatcaacaaataagaaagagctcctgtggactctcagggagggagagcaagtggcagttacatttagccctaaatattcaatggttgcatggggttttggcagccagagtcttattaaacttggtgggtaggcttcagccaaagtctgtggcactctctggaaacacactcctttgtctccaagacggaaatccttatttttgttgcttaattcacgttattaaggggtcacagaacaaagtctaagagactgaaatgaataaaataaacaaaaaggatattaaaaataattggctcatcagttaaagtaaggattgaactcaacacaagcctgaaattccctgataggattatttagtgaacataataaactctttggaatcaacatgctgaataagactgttgattttcttacagtcagattatttgtggcctttataacttaaatggtattttctttttttacttaaatgatattcttatgacctctgatcaaacatatattgaaataataaatttaaaaacagtaactttatttaagcggggagaacaattttcagttagtactatgaaagtgatttatttatttatttatttatttatttattttttgagatggagtcttcctctgttgcccaggctggagtgcagtgtcacaatctcggctcactgcaacctccacctcctgggttcaagagagtcttctgcctcagcctcccaagtagctgggactacaggcacgtgccaacacgcctagctattgttttttttttgtatttttagtagagatggggtttcaacgtgttagccaggatggtctcgatctcctgacatcgtgatccacccacctcggcctcccaaagtgctgggatttagaacagaaaaggaacttttgattaaggcattttctcaacattaaaacaagaatattactctttcattataaatgaccatgaagaaagaaaattccttgttagtttgtttccaagtcctacatatattatagtcaggtaatttgtataaaagaagacatttttattacgggtgagataactatattttgaaaatatatactaaataaatatatagtcacagaatcatttatgcatatttgaaatttcttattcttttctcctgagtttttatttgagtaaataagatggaataattatgtaatatatgactgggtcatttgttagatctgaggtttgctttaggaattttatttttgggataaacttgctttttcacttatttagcttaataatttatgaaaaatatttctgcttctatcactaacattatctccagtaatgcccttgtttaatgaaagaaaatttccctttaatacttacaattaatcttgcaagtaaagcattggactagagtccaaaataaacatcaagctatccaaataccttgtactttgaagagggctacttgtatttacttatccattcatcagtgtcatcattttaagttcaaacattggaattgtatgtgacttttatcttggttatgaagaattgctttcattaagaaatggattaactatggatggaatctatggatggaattaggcagcttcctggggccaaatgttattgaaaatgtattttgtatagaaaaaaatatatactttttaaaaagatttagacttctatatcaagttaattagagaaacctccttttcaaaagcagttaattataattaagggcaaaatataaatgtctactttaaattccttaacaaagaaaactgatatctttgcttctaagtcaacagatgaaaagatgaaaaaaatgtggaaactttatttgaatggattgattcaagacacattttaaaatgcttgaaaataggttaggaagtgttcagcttttaaaaatatgtccttctggaaatattcattgctcacttgctcagtgcaatgcaaactatgagataaaaagtattacaaaacatagtcttagtctttaataagcttacagttaacaacagatgtgtctttcttaatagagaaaatagtggattaagtgttatgaatgatgtaaactcagttctactggtgtgtaaagaagtatttaattttggcaccagtgattgaagaaggctttatggaatgacttcactcttgattatggaagttaatagtatttcaagaggcaaaaatatgtgagaaacagcccccctaccaatagacagtgtgatcaaatattgcagcaattaagatattaaaaataatatctctgagcattttaatttgtcagacactagaatgagatatcatgtcatttgatcttctcagtagctctgtgaagtaagaactttactgtcacaattttacaaatagggagacaggaacaagtgataggtaacttgttcacaaaaaacataactaggaagtatcagatcagagatttaacgtctgacagagcctatgatcttaatcatttatcagtataaaggggttgcaataaactatcacccaagaatgtaataataagggctaatctaatagagaacatttactatatccagcctctgttctaagtgttttacatgtattatctcgtttactcctcataatagccctttgtagtagttattattttattattattatttttacaaatgaaaaagctgaagtagtgggaggtcaggtaacttccagtaagtggagaagccccaattcaaatatgaatgatctcttcctgtccttgctttcagccatgaaggtattttaacattatagatataagaataagattaatttccaacagattgtgaaataaaaagtaagtgtataaattacatagaatcattttcagtaaagtgacttcaagccctcagaattccaacatactaatgccaagggaaaatactatatgtcaattaggaaggtttacttattattgaaagcatggaaatgagaaagtcattgggacaaaacaggctgacctatctgtaacagaaatagctgccttctccttgtgggcaaaagtagaaatattgcaacctcaaataaatcatttttttgtcggattaatgcttctggcccagtaaaggtttatgcagaaatttgagaaagccacctggctttttaaggtaaactctgatggctctcaaactttgtttacctgcctggctcaataactgttcttttttctttgcaaatagaataccaaatttgagagtgcaatattcctggctgaaaatctgtagtcccgggatatcttacagctaacttttgtgatgtaatgctgtcagaaattgtaaaaggttgggaattttatcctatttgcaagctagcaagttagcctgcatcactttcatggatgctggtggaaaatactaggcttttagattgtatagagagactttattactcatggtacagcaagcagcatgaccctcatagtaatgtctgtttctgttgccctcaagttccacaaaacaatgtggagcagttcaagtgaataccctatgtgtaatgggcttgtatggcagctgagaaaccctgagcttggggaatccatgtgtcttgttccctaataagaattcctgttttcaaaatgtgtagtaacacaggagacctatggagaattgtctcccaataatgtaatagtcacattctttctacaacgttgttggctaatagtaaatttcccccgtgagattgccactcctctagttaatctgaatggtggggattgcgrtcaaatccattcagtttttctcatctgtatttatttaaagagactataaacaggactttaatgagcaggattgatctcaaccatgcccaccagggtcctggacccagtcagctgaacaaatactatgaaccactgaagtttactttaaaaagccaggcggctctctccttaagtttctgcataaacctttccacttggcgagaagcattaatttagatacaaaaggatttatttgtggttacaaagattccaccattgcccataggcaaaacctatcacctataaataccctggccagtgagttgaagctgacctgaatgaattccagagctgaagtggtgccattgattgcttcagtgaaattcagggaaaaaatttataatggatgaatcccatagtaggataaactgcccacaggattcacagatattgctccatgtagctcccataaataaataaaggtagcctcactttggagagatctcattagtgtactatattatcttctgctgatctttacttaaacagttgaaaatttcttatggctaccctaatgttcaaatcatgtgtcttcagaagggtggtaatcttcatacaaaagttatagtactggaagtgggcctggtttgcctgagttggtggagggaagggttaggcccaatttcaggaacccgctgggtggaagacaaacaaatattacctcctatgtgacctcctcgccctctggtaacgccaggtgttctcaattactagaataattcagtccagttcttgtttaagagagactttgtgagagtagttgattaggtccgtcctcattgtctactccaggggtcagcaaactactgttgggcttgaaatctctttttgtaaataaaattccattggaactcagccatgttcatttatttgccttttgtttggctgcttttaagctacagtagcagagtcctgcacttgtaacaaaagcaatataacctaaataaccctgacatattattatctagccctttaaggattgtttaccaatccttgttttatgccatcagtttagtggctttattaccacccgatgtaatgagtgagaatagtggyagagaaggtatttagaggtattgacaagcattctgcataggagtggcagatgcatcctgwgctattttcagtagacttatttctaagaataaaagaatggcgatcaagtcgtgaatagagccatctggtaagaaaaggcaagtccaacagtcagtgaagtttaagacacttatcctagtttggatgttctgtaccagagagttttctttcatggagaatactccagaagtcattttgaaagacaaatatcattaacatctgtcctttccccataattgtaggggtctgtgaatgttcccttcttatttggtgctctccctctacctccagcaaattggtgtatttcatcctaataactgtgatgtcatcttttttctcaattatttcctgtttgcacatagactttttataaaaaatggtgcaagagctacaaggacatttttataaaacttacagagactgattgtgtcccccactttggcctgcatgaacaagctgtgtcctcacaaagtgctcattatccttatgatccagaatcatatcaataaaacaagaaactccaggagactgaaacataattgagtccaaatcccataagctccgtttaggcaaggctgccacacaggctgctctggggaaaaagaaagaagtgttttgcccagaaaaggtcagaatgaaattttgaaattaaaagtaggtgtaggtaatcccacacgactttcatgttgatcattgcacagaaatcacccaagatgatattatttctttcttggaacatattcataaagtgaacaagcagcctcactaaggtatatgagccaggaaaaggtgaagaagataaagctggacatcttttgaagtcaacatttgaggagattgtttcaacactcaacaacactggaagtctgttgatggtagagagcgaggaagatacgctgagttccttgactaccaggccattgttgagcatcttttgcatacatttgtcaggctgaaaatggtccagtgagctgaaaacatgacgcagattaattttaagagcttctaaagtagtgtctacatcagctgatcagacyggaacaataataacacgacctaaaaaagtatctacaacactttcaggcagtcctaagaagtgatcagaggccaaaatagtcaatgtgcttgcagtgggagtggacaaccctctttggctttccctactaggatacaaggggtcaactttcagcaggaatcacaagtattgcatacagtgcaggccctggtaacagaagttatttgctttgtgtcccatctgtgaatggtagacacggtaaatggtagatcatgtcaggcagcaatggtggcaatctgtgtgtctgtctcaataatcagcttgagtccagttgatctgatcagttaatggactttcactatgggtttctccatgagtaaccctgatgtaatcttgatatacttccacaattcacagctccaaagagtggtatctttaatgttactactctgtagttctctaagtggcataccaaaccactaagctgttgacaacagatcagcagtcataatgtgtatatatacatatatacatacacacacaaacacacacacacacatatatatgtgtaccatggaggagagtattgtacagagctatgagaacaggcttcagttctgcccacttagcagagtaagcatgtccattttcagtactgcatagcaggtgctgagcttgaatgacctaagcaaactmcaacgaacactttcagatttcaggtcagcaaagtcatcaccatttgtttatggaacttctgcatctcacggccctttagagtcagcacttagcttcaggaggtaaagtcttctaaaggaagaatttgattttgatgtgcatgcttgttgrcccctgcacatattactagttgctgaattcgaagtgaccctcctcaagataggaatgtcaggtcattcatagatcaggctttcggtttcagttaagagtccattagaaagctaatagctgcttttcaaaatggatgtacctggtagccatatttggggagcaccaagtccataatcccaaagtgagtctctaggaggggcttcttctcttcagcagaggtcccaactggcatagtcattagtcagagtcagaaatgcccagagtccaacatagcgatagggatctctttctggggagagaagaagcatgtctctatgtgacattattcccaataaggaaaatctccttgaatatttgtgaagtaggaaattagaagcatataacacatgaattccaattatatactcaatgtaggaagcaacaacagtatattaagttggtataaaggaacccagmtacatgtcacgtgcctttccctctcccactgaaacccccaccaaatagttgaatctgagcattttcccctcttcccccagggctggataggtgctatatccgacaaagccatagaagtctgagtccctcccttccccaagatttctcagaatattgatacgtgcctagggtgtttagtctctcttatggcaagaatccttcttttaaggcagctratgccrgggaaaaggggaaaggaggggaagggattgtggatccagagacctattgtacagcaataagcaaggcactttctgtttcaagtagctactatcaagttcaaccaagcaaatctggttttggtctactccaagctctatatcttcatgggtaacaccatttatttcagctcagactgattctttcactttttatttttttaactttgatagttgaaggaatatctctgtatgaatattatagaaaaaaggccttccaatatttccaagcgttgaagaatgattgtgtttgtgttaaaaccttgagtggcacttgcttcaggaaaaaaagggtgtttatttgctttctattaaggttctttaaaaattggttggaataaatgctagttgaatttatacttcatgacttgaaaagcaagctgattttcattctgccttctcaaggagtgcagtatgtttaaaatactacttttgcctgctttttgatttgctatgaaaaagataaatattttaaggacacctggaaaattttgaaatacattttatatgcatatggagattaaagctaagagactaaaaaaaagtcattctttattttggttaattttgttttgttttgtttactatggcactcagtccagtattctctctgcatagttataatgcagccttgctaatgtaaccagaataactcttcattgataatgagaaattaacagctgaaaaaaatcaataccataaataggtaatataattttaatgaaaggcgacaatctgaaggctggatattgaattagtatctggagagtgtgtgcatagatgattgggggaaggaatcctaaacatcagtcttcctcacagttacatttacatgcatgagaaacaggactcctacttacactaagattaaacctaattagtatctatgtagaaaagagtgaagatgggaaaacaaagataaatgtgaagagaaaatgactgataattagccaaaattgaattaaagacatcaattcactgagccccaagcataagtaactacaaataaataaataagcaaattaattaattaattaatcaagttgatgttggtatttgaaaaaagaaaagcttaaatagcaagaaattaaacttctacctttagaatataacaaaataagactatattaaacacaaagtgtaagaaaataaaaataaatggaaataaaacagaaaacaaaatgagaaagttaacaaagtctaaaattattaatttttaggaaatattttgataaaacactagcaagaccatttttaatttttttttaagattatacttcaagttctgggacacatgtgcagaatgtgcaggtttgttacataggtatacatgtatcatggtggtttgttgcgcccatcgacccatcatctacattaggtatttctcctaatgctatccctcccctagccctccacgccctgacaggccccggtttatgatgttcccctccttgtgtccatgtattctcattgttcaactccagcaagaccatttttaaaaaatacacacagaaaacaaaatttgccagtatcagaaattaaaaagaatacatatcctccacacacaaaaaatattctactggaaattctaacactgaaataaagcaaagaataaaacacaaagaatttgaaaaggaagaagcaaatatgtctttatttctcaatacataataatgcacatagaaaatcctatgaaatctaaaacttataatttaattagtaagcttatagcctatattcgcaagtaattgtatttctttctaatagcaataaaaaattaaacctgaaataaaacataatatcaaatacccagaaataaatctgcaaaattttgcaagacatttacgctaaaaattatgaaacattgaccaagagtatttaaagaagaactaaataatggagagatatatgttcatgattttcaaattttagtcttaagatatccatttttcataaattgatttatagatttaataatcaaaaatcttaaatttttaaattgtttttagagccttttgaagaaattgataagctgatcctaacattgtgtaaagatcttatatagccgcaacaattgaaagagcaaagaaaaagattggatgaaatattttacctgacttcaaggcttttttgatattggcataaggattgacaaatagattcatgggacataattaggagtccagaaatcaacccacaggcatagagtggggttgattrttaaccaacatgccaatcaattcagtggtgaaatgtttaagcaacattgctgaaccaattgggtccctgtatggaatcaaaacaaaaataaattttactctcatctctcactacacacaaaaattaattcaagatttatcacatactaaaactaaaaccttagaattagaactcttttagaggaaaacataagacattatcttcataacttcaggatatataaagatttcttaggtaccaaaaagaacattttggactttctcaaaattaaaacgttctgctcattaacatacaacattaagaaatagacaaactaygaactgtgcaataaattctaaaacatagatcygaaaaacgtataaatatgtgaaatatgtaaagtgttcaaagaatacacatatttaaaaactcttaaaaagcaccagtatgaaaccaaaaacaattttaaatgggtgaaagccttgtccagaccattcacataagaagatatataaatggcaaataaactgtgcaactttattagtccacagaaaaatgcaaatttaaattacaaggagatgccaatctgcatccactagattggctgaaggcaaagactgacaatccaattgcacctctgatactttgctggttggaatgtaaaacatacagccacttaggagagctgtttggcaattttttaccaagttaaatatctacttaccttgtatacctcacctatttcactccagaaaaatgagaatgtatagccacacgaattcttgtacaagaatattcatagcagcattattcctcatatccaaaactggaagcaactctaatgcccatcattttgagaatggttaaattaattttcatacagtagaatactattgagcaaaataagtaatgaactaktgaaatatgaagaaacactgagttaagtgagaaaagactcacatttataaatgagtaatactgtatgattccatatattttaagtccagtaaatacaaaactaagctatcgtggtcaaaatcagacagtggtcacatctatgtgtctggggtagattgtctggaaagcgacacaaaataacttttagtggtaatggaaatatccattatcttgttttgagtgatagtaacagtggaatacaataaacaatctgttaagcatttaagatctgtttattatatgtaaattaaacttcaataaaaaattacaatatagaacaacccatcaaatatttgaagacaaaaaaggtaaaggaaaggaaaaaggaaaaaaaaacaatttacagaaatatcataattttaaactaaacacataattgaatcatgatgatttagagattactgagtcataaaaaaaaggtgagaatttaatttggtggccactgggaacccaaatttgaaagtatattagaatctctagaagagctttttagtaattggaatgcctgggcctcattccaaaaccattcaatcaaaattttgcagggtgcatagcaacatatatatatatttaaaactccacaggtgcttctgataagccagctttgttccttgatgaggcatctggaaacagcaaatttcaacaggtctcttcttccacatctttgattgacagttctgtttcccctgccagaaagactccaagcgatgcagaattcgttactttttgatgcggcttttttcatttttagacattggacatttctagttgtcaaaaagtacatatgaaactgaaaacacacacattgatcaaaatgagccattttctggaataatattaaataagtagtctgttttgcttatagtcgtttatcaataagtaaataaaatgatacctctctaaacttaccctagatgtctactgcataagcaccacaagcagtttaccatttttgaatttgatgttaatttcagatatctcacctttctaagtggctttatcccttgctattctagtttttccatctctctgtatgagaagataagacctgacatatttactgattacaaaatatgccacgtgttgtcttgttgctgtagagagatgtgagatatttacctctttttaaaatacaaagcacttgtactgtgttttctttatcataatttttgcttytcaattttatgttttaccttcattgtgttaatgatattgaccaacccttccaattttgcattgttctcaattggcttaacatgctagtcatgatttcaaccaaatgccttccaagaggaggcattgtcaaacaggtggattatggtattgaaagaggctcattaaaggcaattggcagtcgttccaggcagactcaccatcagagaggtctaagcaaagaattaagacagatatatctgacaatggctagatgccataataaaagagtcttgcaactgaaataatacagaaaccagaaagttataagaggaggtgctcgtyagaatagaaaaatagtaggtaaattgttttaatggaattattctcttttgagagtactgatgagagaaacattaaatttcagggctggaaaagctgggtagaactgatttactagaatgaagcaaacagtaaggttgataatgtgctcttcatcaaatgagctacttgagttatttaagtttccttgcctagtaacaataacaacccaatattgggatggatatattggtagatctattagaatggattcagctgtagagattggagggctacttcaatgacagggagctaaacagtttattatgataatgatgcaggtacatgaacttaatgaaaatagttattctcttaccatatcctcacctctacttctattcatgtgttggcttcattctcagtcaagttagcagactctggtgacctaaagcatatcctgacagatgattgtattaaagaaagatcatttcctgtgtgtgtgtgtgtgtgtgtgtgtgtgtgtgtgtgtgtatgatacacatagggatttttatccatacatcaaatactacatgttgtttgggtccttttccattcttaaaccaaataatttggtcaagtatatggagggctctgagttaccaccctgagttacatgatgactctttggtagaagggtgaagggtaggcatacatatacacatgtacctccttttttggtttgaaagcaatcttacttataagaaaaattaaggaaactataattgttttattataattcattattttaaaatcccttttagaacataccctttgaaagtttagtttatatttatttgtttcattttgttttggtcagctaaaaattattttatggtcttaacctttctgttatttttcttatagtttcaggatagcctttactattctgcaacaaggttggtggtaaccttatataaatctccactgtaatttgttaaactaattttgaaaatcagagacctagatatgcataataagtattgacaaaatatcttagcatggaaatggctgtatccagtatgctgggtagatatgtacactttttgttacccatatgcacaaaaacaaagaaaaaaatcaactttatggatgaatcagagggttatttatgggctccactgcatactgaaaacattgatttaatgttttcaaactagagtcagtacatagtctagtgatctaaactacttaagcaccactcttcaccgtatcactctttacttacaatttaattgccatgtgttcttttgaaatgagcattgaaggaccatcctcatgaatgcattcctaagaatcacaatgtttattctgtgtagtcttgatgtaggtttaatcaagacccttgaaatggacacattcctcttaattgattgcaaatgtttatgattacccagagagtgttttcaaatgtctgatgactataatattactgactttctctctagacagtcttaaagctgtttattgctcatttggctactttccagctttcagttgtctcatttacttccatgtgcatcaataagcatataattaatccaaacatcttattgaaccatttcctttgcattagtatatatgatgttaagtaggtaaaatttatatattctactgctttggatttattcataagtaaaatgttcttaacaaatattgatcagcatcaatgtaaagatgcctcttatactgaaatattatgatctcatgctcagatcacaagytattatcaaatagaaattcaatctcagtgatgggccactgttgccagatcgtgtcacctcagaaatctagtatagcatataattatctttattttttaaatacaaagtaaaaatgcagcacaaatgccaacaaaataataaatgactcaaattctttttgaagtgaagttttttctaagcaagattttttaaatggcttatggttaaaagttttattttctcaggaagcaagccatttataaagtatgttttgctattcacgtgttgggaaaagtctcttcagctcaatgatgtatctcatatatccagcagtatgacatactccttcctatttttaaaaaaagcccaaggtttcaaatattaattttaatgcttggcattctgccataatttcagaaacaccaagactggctgaatacagtactgaagcctttttctactccaagtgaggtcttaaaatgtattacatgattaaaaagattaaatgtgcctaatctacacagaggaggaagaaatgagtagaggaaaaaaataagacacaaaaacttagtgacatatctcttttcctattgaattcaatattttaaaagtgatatttcaaaacaataatcagactgagaattactattttatgtattccagagaatgccactaaattttgttaaattgcaactgtagtttggaaaatgagtagtattgcaggatacctctatctgtaatacrgtctgtggtatcatcagatggtatagataatatactccatgagggcaagaactgttttttgttttgctcaacattctcttccaagtacctctcacagtgcttggcacatggtaagcaaagacttgaaacagatttatttgtttatgtttcttaaatttttaacattgatacatatgacatgtacatatcatattttcagggtacatatgataatttgataaattcatgtaatcaaatcagggtagttgagatatccatcaccttaaatatttatctttgcaatagcagcatttgaattattttcttttagctattttgaaatgtacaatcaattgatcttaactatagtcatcctactgatttattgaacaccaggtcttatttcttccaagggtatatttttacccattaataaacctctttccattcccttaacccctctacccttcttggcccctggtcatcaccagtctgctctctatcttcatgaatttcacttttatatgttgagaaatatctgcttagatgctgaccactggtatggaatgagcaatascgtgtcatatttctgattaaaagccttttttggggtcagtttagaaatatacattaaattctaatatttcctaggattttttcctaccctaatctactttaatataaaccattttagtagagagattaaaattaatcttactttacagatgatagtaaagtcattattttacgtgatttaataaaatgaatcattaagcttcaatcagccactacctcttggaggattgttgtgggaaactggcctaaataagtaacacaatacagatatctgagaaattgatggttgctagaatgttatagacatcaacttttagttcctatcaatattttattccattttcctattaaacaatggcagaataaaatcaagataaatgttgttattagcattatcacattaaaatatcatttcctgtttaaatgttaatttcttccactaaactggaagcacctcaaagacaggaactgagccttcatcttccttatcaaagtatcagatgtttgctttaaaaaaaaatgtattaatcaagaccctttctcttacaaatagcagaagtttacttcaaaatagcttttttaaaattgactcatgtagtttgaaagtctagggaacagctgccttgcctctgtttcactttagttactttcacactagacatgttggctcctgcaatcgcaaaactactgcattgggacaacttgtgatacacaagaaagaccacttcttctgattatccatatttcacatttcagtcttcactgtaatttgttaaactgtttctgaaaattagagacctagatatgcataataagtattgacaaaatatcttagcatggaaatgactaaatccagtatgctaggtagatatgtacacatttgttacccatattcacaaaaacaaagaaaaaatcaactttagggatgaatcagagggttatttatgggctccactgcatactgaaaacattgatttaatgttttcaaagtagagtcagtactatcccttaaaaaattacttaggccagaggacatggagagttcgaactaaccagcccaggacacatgaccatccagcaatgcaacctagagagttgggcacatgtagaaaacaagggaggcatccagatttatttcttaaatgaaaagtggcatcttgttgtttgaataaaggaaaagaaatattgggaagattaaaaataaaagacatcaactacttagccaccagtataaccctgttaacttagaactatgattctaagttaacagggttayactggtggctaagtaagaatccaaacctagttttcttacaccaaatgcagtgtgttttcccctagataaagttgttttctaaatgaaagatggaaatgttgactgcaaatgatttataaaggctttacatatcatcaaagcaccctgaaaaccaaaacagtaacttttgacttgataaatgtaaggaaacattcaggatgaactctgtcctgtgccaccaaaatcccccttcaaaactgaagactgtcttctcccaaatgctgagagggcttgccgctgactaccttccttatgaattaccctccgcttaggggaaccacctcaccaaaggacacacaggggtgtaaaattcctccttccaccagcgctaacttgggataactctgaagaccatcccacttccagagctccctgcaggtcttcgctgagactgcatcgtagcctccctctgctggctctttcttgttcccttcccttggggcacagtgttattcccgagagcagtccctgatagcctctctagtctccaatctctaccccagagtcggcttcctgggaacctaaccttctacagttaatctgcttttcttaggcctgaaggacaattaaatagtaactaaaacaatgaaaggttttcaagggaaagtatttatgtgtttgctatctttttatctaaaattttcctctatttttaaacaaaacctcacattactttttagcatggaaatgtttataccttaccctcttatacagtctggataagaaaaaaaatcactaacatcagggacgatatgcttatccaggttctccaataactacttttaagggaggcaagcagagttgactaagagattataatcttggcagtgtgcagaatgttttcagtatgtgcatttactgagaggagagagaattcataatctttgattttctcaaaagagtctgtaacacaaagaaggttaagaaattggagcactggttcccaaatagtctcttaagaagcatcaagtgagagaaaatcccttgttttttttttttgtttgtttttttcctgagcgtttctgatcccatagaaatgggattgagcaaaaatcttcatttttttttttttttaagtttcagcttttactttaggtacaaggggagtgtgtgtaggtatgttacatgggtatattgcacccaggaagtaagcatagtacccaattcatttttcagcccccaactttctctccccggctagtagtctttggtgtctattgttcccatgtttatctccaagtgtagtgtaatgtttagcttccgcttattagtgagaacaagtggtatttggacaagttttccagatgactccaaaataaaactcagtggattacaatttggaaaaatacagacttatggatgaaaatatagttctatgttagtttctattgctggtgtatcaaattaccacaaatttagaggcttaaacaacacaagttattaatagtattttttattttattatgattatactttaagttttagggtacatgtgcacaatgtgcaggttagttacatatgtatacacgtgccatgctggtgtgctgcacccattaactcgtcatttagcattaggtatatctcctaatgctatccctccccactccccccaccccacaacagtccccagagtgtgatatttcccttcctgtgtccatgtgttctcattgttcaattcccacctatgagtgagaacatgcggtgtttggttttttgtccttgcaatagtttactgagaatgatgatttccaatttcatccatgtscctacagaggacatgaactcttcattttttatggctgcatagtattccgtggtgtatatgtgtcacattttcttaatccagtctatcattgttggacatttgggttggttccaagtctttgctattgtgaatagtgccgtgataaacatacgtgtgcatgtgtctttatagctacatgatttacagtcctttgggtatatacccagtaatgggatggctgggtcaaatggtatttctagttctagatccctgaggaatcgccacactgacttccacaatggttgaactagtttacagtcccaccaacagtgtaaaagtgttcctgtttctccacatcctctccagcacctgttgtttcctgactttttaatgattgccattctaactggtgtgagatggtatctcattgtggttttgatttgcatttctctgatggccagtgatgatgagcattttttcatgtgtcttttggctgcataaatgtcttcttttgagaagtgtctgttcatgtcctttgcccatttttgatggcgttgtttgtttttttcttgtaaatttgtttgagttcattgtagattctgcatattagccctttgtcagatgagtaggttgcgaaaattttctcccattttgtaggttgcctgttcactctgatggtagtttcttttgctgtgcagaagctctttagtttacttagaccccatttgtcaattttggcttttgttgccattgcttttggtgttttagacatgaagtccttgcccatgcctatgtcctgaacggtaatgcctaggttttcttctagggtttttatggttttaggtctaacgtttaagtctttaatccatcttgaattaatttttgtataaggtgtaaggaagggatccagtttcagctttctacatatggctagccagtattttttagatcacaagtctgaaatggaatctcagtgggctataatcagtgtcagcaatgctgtgttctctggtggctctagggaagagtcaatttccttgccttttccaccttctagaaacaacccacctttcttcactcaagatctctttcccccatcttcaaagccagcagtctttcatctctctgaagatgctgagtctcaacacattcttcaggagttagacctccctttgatgctcctgttctgtctccctcttccaattttaaagactgtgattacactagagccacccaaataatatgggataatctccctattttaagatcagacaattaacagctttaattctatctgcagccttaatttgtctttgttgtgtaatctagtatattcacagattacagggattaacatgtgagcattttggggagaccaatattctgcctaccacaagttcctttatagtgtcatggaaaaaacatcttcctcctcccccagtcttatgtttaataactcaattaatgagccttccaccacctgttgttatgtaattatctggtcagtagaagaaattactggaaactacagaaacttcttttagctttctgttatccataaatagcacctagtcacacccactcacctggaagcaccttgaggtcaggaaccatatattctttattttggaaacacagataactcatctcattggctgccagctaatcagcatacagataatgtggctgaatgattgtgatgtgtgatgatgtttgtgttcattgaacaaaaccaaaggcttactctcttttattttttatttttttgacatggagtccccctctgttgcccaggctggaatgcagtggtgccatctcggctcactgcaacctccgcctcctgggttcaagcgattctcctgtttcagcctcctaagtagctgggacgacgagcatgcaccaccacacccagctaattttttgtatttttagccaggctggtctgaaactcctgacctcaggcaatccacctgccttggcctcccaaagtgctgggattacaggcatgagccactgcacccagagtactctcttttttaatgactcttacacacagcagctcataaagagcatggctctgaatcttctctcattgaacttaccagttgccacatatcatgggtatttggtgtcatttcctcaaataagcaaaactatttatgcttaactcctgcattccatgagtctgccttgtaatttatgcttgccattttgggtagctagccatcagtaaaatttaggcaatctggcctgttggtgggaagagtggtggtctcttaacaaatagtcatgttctttactaacaataaaggaattacaatatgttagaccctacactagattttgtatatacacagcaaacacacatagacacttttgcaaaatcaatctttgaagacttctataagataaatatttttttctgggagtggtggcttatgcctgtaatccaagcactttgggaggccgaggcaggtggatcgcctgagctcagcagttcaaatcagcctggccaacatggcaaaaccctgtctctaccgaaaatacaaaagttagcctggcatggaggtgtgcacctgcagtctcagctgctcaggaggctgaggtgggaggatcgcttaagcctgggaggtggaggttgcaatgagctgatgtcatgccactacactccaacctgggtaatagagtgggaccctgtctcaaaaataaatataaacaaataaattcttcatttacagttgaggagaaattttcaaaaaatgttacagtcacatatctaagaagtgacaaccaggattccagtgttaggaaacagaggggttatagtggtcttttgtcacatcacttttcagtatgcatatcactctgatcaaaaattaaagctaaaaaacgttatatagtttcaaattaaggataattaatttactagatcaatttatttattaaaaaaattttttttgagggggcatctcactctgtcacccatgttggagtgcagtgacacaatctcagctcactgcaacctccacttcccaggttcaagcgattttcttgcctcagcctgggtatgtatttttagtagagacgaggtttaccatgttggccaggctggtctcgaactcctggcctcaagtaattcacccacctcascctcccaaagtgctggggtttcagacatgagccagcacgcccagccccaatttaaaacatgcaatcaaacacgtcacttccagacttaaactgcttttcattctgctcacatatccagtcatccacttaaggcagatcctctacttgaaactttcaatagattaaagctgtattttgaataaaattaaaacctcttcctgtgtctcacagagatctacataacctgactcttcctctccatccagcttcatgtctcactagctaggctgcaaccacagtggtctcctatagatttttgatccacaggctctttaatgtcctggacattttctgagctgttgccttttctccttatctatttgcttggataatgtcttcttatactttacctcagagtttaaatactagttttgcagagaaaccttcctctaagtaaaatatatcctcctcctcaccctattatcatctaccaatgcattcattgttttcttccaaacacttagtgtgctttgtggttttagtttgtttacttgtttattgtctgttttaatgtttgaatgggtattcattgatgtgctcctagctcctagyattgtgtctaatattcaacaaatgtttttggagaacaagttttttctcaaagtgaaaatgtaaactagtactggtattttatttttgtaatcagaagatttcacagagaataagtaatctgaaactttattctctagtcatgctctgttttctgagcatcttggatctatttcagtgttacttttgttttgtttgccttgtattcagatgtacaatttaagtaactcaaataaagaacaacttacaatttgaaatcaataatctgctctgtctgctctgacatgtattttttttttctttttttttttttgagatggagtctcactctgtcacccaggctggagtgcagtggcatgatctcggttcactgcaacctccacctcccgggttcaagcgattcttctgcctcagcctcccaagtggctgggactacaggcgtgtgccaccacgcctgactaattttcgtatttttagtagagatggggtttcaccatattggccaggctggtctcaagctcctgacctcatgatctgcccccctcggtctcccaaagtcctgggattacaggtgtgagccaccacactgggcctctgacatgtattctaaaggtatattggttctggggtgaggcccaagcttgtgtatttttgataagtttctcagatgattctgattcacatcaaagtttaagaacatctgcttagyatgtacrtagtcttgttattgtacctctaccagtgtcaaccaaagtccatcaaatttaaccctttgcttaattcatggttcagagtcttacacctttatgtacattctgacttggatattgaatgaatacataacacctttattattccacctcttttatctcatcctctgccctagctgaggattttattcttttaacctgctttgatggtaacatcctgagtttaccacataattaatgataagaaatgtaagatagaatttatacagtatatatgttgtaaagatttttaaagtcatcagataagtaaacatataatatttacaactattttgaaatgaaagaattcagaagaagaaagcaaaattgttgttttagtcaatttgtaaccttgcaaatgtaaatgtttataagagtaaatgtagtttctaaatttttggctatttgttttcctgttctgtggttttacttactgctttttctggtttgtatgttgaaaaatacataaattaactattaccactgagaggcaaattttacttgcagggaagcacacactattaaggattttgagatctagtctattcataagttccctacaatcccatttacttgtttctctagtatttgccctttaaatattttattctttggatatataatgaaaaatatagttcatgatatagtaaaagaaaatctactatattaagattatagcataatctatattaagcttgtattgtgccagatacttatttcagatatcttcttctataaacaagcaatctgatactaagaagaaatatttgtgatatttcagacatttattgttacttaaatacacatcaaagtacaaatgataaactctttagattgaattttacttttcttatttaagtgtgacgtggacactggacattttaatttgataaatttctagaactttgcttattttggaataagtatgtaaatattttgctgatcatcatgcaatcaaaaatgttacttaatattttctaaaatgctgaaatatgttttgaaaaaatatgttttgcacattaagtattttctccttactaaggcaaacttggtatctcctaccaacttttccaaatttagctaaggaggtaatactaattaaatagattaaaatgcagcttttatttgtggtctaagttacctgaggccctttgaagataaccttttgaaactttctgtttaactgataaaagtcaagtttagtgatactgttgcctattttaagaaacattcataatcttgattcagattcatcagtcatcaatgatattcatgcttacatgaggttaatattactctttaaaatgctaaggaaaatagggaatgtctttcccttcttcttgttttgctctagagaaatggggcatctctccaaccatctccgtgcaccctcacccaacatttctaggattgacatcatttaggttccatgtagatagaaagaaatccatttaaaaaataacaattcctacatttttcatgtgaacatttcaaaatgtaccaaaccttaaacatacttgagagttccgtcagctactcagttggtaattttagacagcctacagtgtggaacaataatctattctgatataggtgaaatagcttatgccttccttctgtacaataattcacaggtattttgatgggcttttgatgtttccagatatccgtggaatacaggagttcttggacaaagtctctcagcagggartggatgttgcacttcagaaggtagaaaacaacatcaataaaatgattaccactctctttgacaccatgagaatagaagaactgaatcgctatcgagacactcttaggcgagcgatccttgttatgaatcctgctacagccaaatccttcattactgaggtaagtgaaaattgtcttggsgtgagagttgtacaaaacaattaaaagctttggaatagaccctacagaggagatgaaaattaagagcagtgcgagggaattaactacacaattcttgttaacactaatggaggtagcatagtgaatgcctcacttatctcatttaccccttactgtccagttagttgctgagagyatttgtgtttatatatatttaggcacatagacagaacaattttaagaagtcttatagaagtttaaaagtgctgttgacctgaatgaatctggcaagatcaagaataaattcacaagtgcacagctctctaactaatccttagtaatttttgtaagttaaaattttacttctgaaraaataattacttgaatcaggacattattgcctaaacatgattactgttacaaaacatatacagatttatatcttctctgtgaactttgtaccaacacaaatarttaagtgtctgaaactctgtaaagtgatgactagtgtacattttatgatgctgcatcctcaaatttttaattgtatctgttcatttagttagaagctctgaaacttagtaaaaatacaattaagactttctagtgataggtataacatctctatgttctaaaatgcctgctattgccttgtaaaagtttattgtcatgtctttttgccccacttcaagtttttaatgttacatagtgatagaactgttcatgactttacaaactttcacatggaatttttaaaaatattttaaatttgaggacgggaatttatttgtttaatactttttttttttttttgcctcatttcactattatgcttctgttagctcctgaagtactgctataaagattccaaattaggaacatgttagaagttctttgacactcacaatatagttggtatcaaaaaacataaggcagaatataaatcactaggaagggtaaaacttgtggaaaactgtcagtaatataaaatttttcattttaataggaaacttcattatgcagtttaaagacaaattatacacattttactttttgagttcagcaaatgacttagagaatcttattgaactactacattttttcataatataaaatatttccaattttaaagaagttgggtctttccttcaagaaacacaaatctggaagatgggagtgagtacacagaggatgtaatataaattaggatgttaaaattgcaatagaggcggttgaagcatctatggtcatttttgttggaggagatcagagaaaacctcactgagcaggtatatttgaactggacttcgtgtcatgggttaggaatttataaaacagaagtggtaatgatatggtttcgctytgtgcctccacccaaatctcatcttgaatggtaattcccacgtgttgagggagggacctggtgggaggtgagtggatcatgggggcggtttcccccatgctgttctcatgatagtgagggagttctcatgagatctgattgtttaaatgtggcagtttctgctgcgctctsactctctcctgcctccttgtgaagaaggtgcttgcttctccttccaccatgactgtaagtttcctgaagcctcctcagccatgtggaactgtgagaaaattaaactgttttcatttataaatgacccatcttgggtagttcattatagcagagataatgctagtgtattcctttgctagagctgccattggcttaaacaacagaaagtttgcatctcacagttctggaggctagaaatctaaaatcaagatgttggcaaggttgattccttctgaggggtgtgagggaaggaactgttctaagcctccctccttggcttgtagatgaattctttttccaatgtctattcacattttcttctcttcgtgtttgtttgtgtatccaaatttcctttttctataaggacatcagtcgtttggatgagggttcaccctaatgacctaattttaatttgattacctctgtaaagaccttatctccaataaggtcatattctaaggtaccggatattaggaattcaacatataaatttgagaaggaggtagtgatggcacaactttacccataacagttaccattagctgttatgagcaaataaggcagaggagtatgtttgagagttcaatttggatcctgtaaaatttgagctagcagtggattcttcaggtggtcttaactatgttttaacacctttatagtacttactatcttcttactacttactgctttcttttctaacacctttttaaaaaatgaactcatataatcttcataaaaagcctttgagttggtactaacatcatccttgttttgtagataagaaaactgaggtgtacagggtttaagttgtcaagatgacacaactaggaagaggcagatctgggattaattccaataagtttgtctctagagtttgtgcacktaaccttggttcccagacaggttggttataaatgcatgactggagaccaggaaaaagatcagtgctcgagatgtagtttatttgtttttcatcagtttaatatgcattgatttactagttcaytggttttccagttcatcgtagaaactatgctaggcactagcgatacaatgacaacaaagatcccattccttttctcaagtttatagcctggtgttggagaaggaaaatgaaagagtatcagcattacaagatgcatgtaatggcagaacacatacatctacgctgatctccagagccagccatgtctggttgtagaggtaaagtatacagtcatgaaatgttgaggaaggagcttgttatagatggtatcttgaaggaggtgcttcttgagttgagcgttaaaggacatgtggattggatcaggcagaaaagggtgggaagaacattctaagcagcaggaagaccataaataaaaccacggaggcggggcatgcagcaagaaggcaaagggctagggaaggaatgggtagaggtgggtgtgttgaccaccctgttgagacgtttggtgacgaaagtaagggtaaattatggtttamaatttttaaaaatcccatgagactgatatcagaaccagggatatctgtttcatttttaggataaaacaagctgagccttttcacacaggtgttgggaaagcaaccagtgatgaagaggagattgtagaatggaaaaagaatattgatgagctaagaccccagagtgttagaattcatgaagctctgccaggggactactactcattaccaataacctacaattgttgcttcaaaggtagacagaattagttcagacttcattaaaggaattttcattgataatccttgtctttctgataatcaatttcaactgatatgatcttaacttctcaccttgtcccccaaccttgaccctgaactttatacttataataatgtatcccttccatcttggtccccaaacacataaaatctattatctttccttaaagacttttctgtctttccccactcatccaccatttttttwagtaacttatcttttataatcactgattttatgtctccaaactgtggaccagttattccacaggcatcttaagcaatgatgtaggaatggcagacagaatgtgaactaccaccacctctatcctagcctaagctcaccctattgtactgttctctgacctgcaagatggttcctgtttctcaattagttgttctcagacacatcccacctcctcgatgggttctaggattgtttcttttgagtagggaataggctgaccctattagtgctgggagcagttcattcaaaagacaggcagaactaaatttgaaagagtacactgaaattctgaagacacaaagagaaattatttctgtgtgacctagagtttcactcagtctagtggaagaggcagcatataattaaatattactatgtgaaagaaaattctataataatgatggatcaatgatgttctggaataccgtaggagaactgactcatgctacagagagcttagccagagtcagaacaaatttcacagataagttgtgtcaccagactcttgaaaaataaataagaattaatcaggtaaacagtggtgggcaaacaattcagaatgtgtctgtgtgtgcttgtgtgtgtgtgtgtgtgtgtgtgtgtgtgtatgatatatgaacagaattaaaaaatcaaattctactgaggcttttaaaattacaaaacaagagtctatttatttctacctccagttattcttttcagaagtatttattttttattttaaaatttaatttgtatttacttttagcatatcctgtgtatttgcattgttcaaaatttaaaaggttcaacaaggtaatatcctgccactgttcctcaaacacctgagttccttttcatgaggcaaatagtgtttcttatgtggcattccaagatataacagacacacacacacacacacacatttttattatttttcttacataaatagttatgtactatgtttaaattctgagcttggaattttaaacttagtaacttctagatcattctattgagacatacgatgtgttcctaataatatctaatggttatataatattcccttggtaaatgtattagtccattctcatgctgctgataaggccatacctgagactgggtaatttataaagmaaaagaggtttaatggactcacagttccacaggactggggaggcctcagaatcatggtggaaggtgaaaggtatgtcttacatggtggcaggcaagagagaatgagagccaatccaaaggggaaaccccttataaaaccaacagatcttataagacttattcactaccaagagaacagtatgagggaaactgctcccatgattcaattacctcccccaggtccctcctacaacacatgggaactacaggagctacagtttaagatgagatttgggtggggacaaagccaaccatatcagtagattaaatgactcttagctctttaacttttttgttttaatttttacttactctagtaaatattactggttgatttattagtttgtcatctcttacctaccttttcttatataataagtgatgatttacttcatgtccttcacctacacctgcacatcctctcaatatattactagttatagcacaattttaaataactttatataacacagttacacttctatttccataccaactactgttgacagtatagtaattgtaaagacaatatactagttgtaaaagttcgttcactatttttccactcttctacctctcagcttccatgtcccacagatttacttttatattgagtgtgttggaagcacgtattttctattctgttactagaaataaattattcatgcttgactaaaagttggctttataagatgaaaatctgtaatttgcttatgttttatcactataaatattgttcactgtacaacaaagtattaagatatgattatatttagttttttatcactcagcttcaggtttcttgtttgaattattacttttcttacttttttcttcatctttgggtatgaaaattctaaattgctgttttcaataacaaatctccaaaatccccatttcctgactgcaccctttcctcccagagaccccctttcctgctctgtttctggtgcatccttaaaatcagataaattctagtgggtcagatccacaaattcctggttcctgtgtcttaacaatttcttagtttccggccttgctgggaaatatcttgaagtaacttctgaaggaagagggttttttttttttcttacagrgaaaacatctgtgttagataagctgtgtagaggcaagagttatagtgctgttggccacaagttcaatgataatgaatcaacaatgaatattaaataaagtgcctttaaatagaaatgcataaaaccagaggctggcagggaccaaactctgtatttcccctaggagcagtgattcaatattcacaaatgcagtgttcataggaattttatagaacctaactactgtgaatgacaagcatccacaatcattgttattatwttcacttatgaaaatgtattcattctaacttcatccttgatgaataatgtggctaattgtaaatttctaagttaaaaaattatttacctcagaacatcaatagcattaatttattacataatggtaatttgatcatttagattgagtagatagaagatggatatggttattttactggaggtagtgctagcttttgcatgtgtatttatgttgccttgctcttggataataatggcgacattagttgccccaattcacctagaaaattcacctatttatttagaagagaatcctatgcttcttactttttttttcaagggataaatatcagctttcaggaacattttgcatgtgacagcatgtgagaatcaacatacatttasgtacaatcagtctgctttattaactgattttgttttttgcaaattcacctattcattaagctttatttgtaattccaaaatcaatactcagtgcactttcatgatcatatatttgcatagctcaaaaacttgagttgttagtaattaaggtcaaataaagctgctctctgcattcttgttttagctcctctatgacaagcaagtgttcttttctctatctatttatttagtgcctttttcaattttttgtgctttcatcagtgatttccctgtttaaaatatctcccaaacatagtgctaaagtgctggtctagtgtccctaagcacaagaaagctgtgatgtgcatcacacagaaaatacttgtgttagataagctatgtataggcaagagttatagtgctgttggccacgagttcaatgttaaagaatcagcaatgcatattaaataaagtgcttttaaatataaatacaaaaaaggcagaggcttacaaagaaccaaaccattcccctagaagcaatgattcagtattcataaacacagcattcataggattttatagaacctcgctactgtgaatgacaagaatcctctatgttcccatattttgagctctccatctcacacctaccttttatttggccttttcaactatcaagacttctatgactctgcaggtagaggtcttgatgcttaattgctgcccttatgacagtctgtagtctacggcttctgccaccctgcttcaccagatatcattgctacctctgatcaagcgtcactgcttcatttttatttttcagtaatttaggcaaaacacttttctgatggcctctgttccttttctcatggttgttggctcatatacgtattcaattcttcatattttcatgagactctgggagtcatctcctttaactttcttgagttgaaaggtccagaatattctttcagatttttagagattaaagctcaacaatgataagggacgtttaagaccagtttttatagattttatgaaacaatattaaatcatggcatttcagatttgaaaaatataatatgtaatattttgttgaattccaaatatatagttgaataaattaaaggcctctctagatctaactcacattcttctctaacttcctccagctatgttctgcacctctgcagattgtagaggacacccagagtttgaaactggtcaaataggttgttagcaggtcaaaggggtgcagaatttttgcatctgaaaagaatttattgaaaacggcttaccatggattatatgatagaaaggcaaatgaagctggaaagaaactgatggattgagaaattaggaaagacagagaaactaaaggttatgatgaggtcagagacacaaccaagttcagcaagtgccttaaacagagagaagttgaggggagaaattctggtaaaaggggaatagcagaactttcaaccctactgttttctatactttataagttagcatgcaaagttattgaaatattcaagagaaatattaactttaaagtcagaagaatgagttttatcaaagaaattgctcacttagcattgtcatgtaattgctaaggggaaaaataagcatatcaattctgtttgcatctttttcttttttttctgtccctggagaaattatgtagcattgagttaattatgctccctttgaagtcttagaaatttaatacattaaatgtctacacttagtgctccacctctcattcaagagtatcaaagctttaagaaaaatactgcagttatgtgcagctgagtatataaacctgctgtgatattggcagaaaattgttacacaatatatctgtaagtgtccttgaaatgaatatagtgaaacagcagtgctcacttggttttatttaaatatagattggaatgatattttgaaaaaaatgtttttatataggaataatgttgcatttgttgctgtgtacattatagtctttccagaaacaatacaaaaaaattctatataaattagacattttggccatggtctttagtgtttgggtttgagaagatacgccaattctttgaaaggaggaagttttactatttatacagcaatagatattgtctccaatttacattttttcttcaaattttcagaaaggaaccctactgttccatgacatccttttatttcacagtaagaaaaggttattattatcttgtattccttaaacatactttatgaaatagttttcattgtattgtactataccctaggttcattgaaaaaaagaactttgaggctgtcaaacaacaaaaaggcaaagttacatatttcaaatatgtatgcagcttcccaaaaataagcctttggaaagatttaggaaacaagggaaggtagcttatctcagtagatacagaatgactcccactcatcaaaagggtgcccttttaagaagtgtctgttcatagcctttacccactttttgatggggttgtttttttcttgtaaatttggtcaagttccttgtagattctgggtattagaactttgtcagatggacagatcgcaaaaatgttctcccattctgtagctcatcatcactggtcgtaagagaaatgcaaattgaaaccacagtgtgataccatctcatgccagttagaatggcgatcattaaaaggcaggaaacaacagatgctggagaggatgtggagaaataggaacacttttacactgtttgtgggagtgtaaattagttcaaccattgtggaagacagtgtggtgattcctcaaggatctagaaccagaaataccatttgacccagcaatcccattattgagtgtatacccaaaggattataaatcatcctactataaygacacatgcacacggatgtttcttgcagcactattcacaatagcaaagacttagaaccaacccacatgcccatcaatgatagactggataaagaaagtgtggcacatatacaccatggaatactatgcagccataaaaaagaatgaattcatgccctttgcagcgagatggatgaaaccagaaaccatcattctcagcaaactaacacaggaacagaaaaccaaataccccatgttctcactcataagtgggagttgaataatgagcacacatgggcacagggaggggagcatcacacacttgggcctgtcagggagtgaggagcaaggggagggagagcattaggacaaatacctaatgcatgcagagcttaaaacatagatgatggggactgggcgcggtggctcaggcctgtaatcccagcactttgggaggmtgaggcgggtggatcatgaggtcagtagatcgagaccatcctggctaacatggtgaaaccccatctctactaaaaacacaaaaaattagccgggcatggtggcgggcacctgtagtcccagctactcaggaggctgaggcaagagaatggtgtgaacccgggaggtggagcttgtagtgagccgagattgcgccactgcactccagcctgggcgacagtgcgagactctgtctcaaaaaatataaataaaataaattaaaataaatttaaaaacctagatgatgggttgataagtgcagcaaaccaccatggcacatatatacctctgtaacaaacctgcacgttctgcacatgtatcccagaacttaaagtataataataataaaaagggtgccctgagtactcaaattgctgtgatagttatttaaatgacacatttttttctaaaataaattatttggagacattatacaatgcacaattttaaagatgaagcaattataatatagtgcatataagtttacaactcaacaaatttccgtgtgaccatcatccagatcaagaaacagaacataactagcatgcccagatttctcattcatgcacgctccagttaagatctccccaaaggtatcctgacttttaacactattcaactagttctgattaattttaaactgtatataaatagaatcatacggtgtgtactgttttgtctttctttcgttcagcattatatctgtgagattcatccatgttgaagtttgtagaaaaaattcattcattttgattgcctcaaaatattttgttatatgaataagacagaatttatatacttctgttgatgatttttttacagttttgctcattacagataggggttctatatacatctttttggatatgtctgtagttttgttgagtatatacttaggaatgaaattgctagctcaaggagtacgcataaggcatgttacatattaatgctagctgatgctgccagtttcccaaagtgtttataccaattttactatttgaagtagtaactgaaagcattccaattttccgtttcttcaccaacacttgttattttctgtcgtcatcattttattttaactgctggacatatattagattcagattttaatttgcatttttctgatggatgatttattttgtatatttatttgcttcgaggatatttttcttttatggagtgcctgttgaagttatagtccccccttctttcccctcatgatttgtagaagccctttgaatataatggataaaagtctcttgtcaagtgaatgtattttgaaaatcttctcttctgtctgtcttttcaccctgtaaatagtgatgaacagaagttcttatttgtaatgtagtccaaattattacattttttgtagttagtactttttgtcttttttaaaagaatgcttcttactccaaaatcatgaagatctacatacaaggtttttctagaaacttgttttatcatttacatttaaatctgaagttcatctgaaattaattgttttgcataatgtaaagtggaggtaaagatacattttattttccrtatggtgaacacttcattttaacacaagatcagtgtgtctaaatggaaagaataatagaagcttccaatacccattaataaagtgggagttgattagtgtatttgaaagtattatctctgtactgcatcctattgctatgacctatatattattttctaatatgaagcacatgactttagaagaaaaggaaaggttatactggtgaattaattgaaataagaatcttcctgtgatcccaggatcacaaaagttcgtgatgctggattctatggtaaaagttgtaactctttccatgggcccaatagttatgggtcatcaagtagcagatagtggccaatcactcaaaaacaaactgctccatataaatatagtttttacaattgcatggaattgtaagaaaaaaaataactggcttaaaaaaaaacaaatctctaacaggcactgattcatccytgatttagtttatatttccttgtatcgtatttatcaattattattaaactgctctcaaatctgagttttaactttagctttataagcttgtattgaaaggcagctctgttactagtcaatccacagatgtgggttttttttttttttttttttttgatgagaaagtcttaaatttattttactttgcgtttgacctaaattgtatatgatagttcttgcttctgttaatgaggcctgagacagcatcaagtttttcttttctgattggagagctgtttaacttgcagaaggtttctctgaacatggaaactaagcaaagaacgggtttccaatgagtctaaacttccaaataaaacagacccaaattaccsctcttgtgaccactgacttgggacactgatattggtggacagtttgctactaacttctcctaacagcctatrgtctatttaataatttttgactgcaacatctactgctggtttttactttatactaagttcttaaataagtcaatcatttttattccattccatttgaattattatccaagcaataatttgaataattgtggaaaaacaagaaaatatctgaatatttgtgacaattgtaccattattttaaatataaaatcacagttgcttcaaccttcaagacaagaaaattgaaatccttctctaatccatttttcacttattcaattattcaaacaatatatttaaagctattctatgcaagtcagtgtgggaagagctgtaagaatacaataatgaatggtatatgattccataccccaagggatatagactcataaggaaaatgctgtaaacacgaagtgtgcaaaataataaaaccataagaacagacacagttaaattactcctctctactcctaaagggacttgagaataaagaaaacaaagttgctacctgaaacctaatcaaataaagtctattggcaatgtatgagttacacatccctaggttattcatatcaaaactttattgttctgctgtaagtgagaattcttgaccatttcaaaaattcttaccataacctgctgtagtcttctcaaagcaagtctagaatgtaaatgaatccaaaaataattaaatttttattgagttttccctccatgaaattatacaggtgattcaaaaacaaacggagtagttagactggacctaatgataaatttgaggttgggggaggggggagggatagcattgggagatatacctaatgctagatgacacgttagtgggtgcagcgcaccagcatggcacatgtatacatatgtaactaacctgcacaatgtgcacatgtaccctaaaacttaaagtataataaaaaaaaaagaaaaaaaaaaaagataaatttgaaaatgggaatttggcagtgtttgtctattgctgcttaragaagacaccagtcatggaaggcaaggacaggctaacatatgaaggtattctctgtggtatgtcaggcacaattcatcagatttaattaaaatgattttcaaaattatgcacctctttgagctctgctcctactctatgacataagaagccaggagaatagtgagctcatgcattctaagcactagagagatgtatttattgcaaataaataaattagcaatttatatgctgatttctatttaatttgcttagtacataaatggcaaatacatgctacaagtgctattaattccatttccagaccaaaaccatagattaccactatctgccctgctgtactgagcagctatagcaaatggatcttagttagcactggagtccgaacctatttgccaatctgggttagtatgagtcagtctcccagaacttaatcaattccttaaatacttactgacaaaatcaatattttagttttgtagagaaccagattttacggtaatgccaccccatgaagctttgttgaaaaattagatagtctctctagattacaattctatccagactttttctcactataatacaaataggagggaaaaaactgtcttgacagagcaaattaaggtcaatttgcttttcctaacaaaacccattgttattagaatgaaaaaaataccctgtagcatataagaaggttaaaaaattaaacttatatgtgtctatccaatagtaaaatttcatgaacatagaggtcctttaatgttctggctaattaaatttttagtgccttgtagactataccaaaatttctttttggtttctacttgtagaaaagtgttagaaatactttagtctgggtttttttgttttgttttgttttttgaggtaagagctagagtatagccaagatacctaaatctttcacattgatatatcagtatgttgctggatattcagattatcaatgcttattacattaaaattcacgttagacctgggtcctgaaatcatatttcacttttttcatatgtcttttttagtaagctatctgagatcctccttataaagttaaatataaatgtacccatgtctatgcaaagttttgcatattggcatgaaagagtatatatatgaaaacatacatttatacacaaataaatgtagaagttttgaaaaagcaarttcattaactctgattctctgatatatatacataatatttatatatgttataaaataatatctgctattcagtattttattctgttaaaactaaaagctattaattgatggctagttgaaacataataagttgttacttccaatattgcttgatcaaactcaagtcagattattagccctctctaatcggccaaaaacttcactttgaaagatatcatgagaaacttgcaaaagtaaattgccatttaaaakttattgtgtagaaattacttttttttaaccgtgattcttgttttgttccttaatagcctaaatatcctgtaaagaacactggtattaaatgtaagaagtaggtgaacaytttaattttgaaaaattattgtaatgaataagcaaatccttattaaaaaggaaaagtgaaagatgaagggtgggtttagaactgaccagaattcttaagtttaatatccataaattcttacatataggattgatatccagcaggtgtgcacctataaagctctcttcactgcttatgacaggcatcctttctcatggaagatgtcctatttgattgctgagtggctgttttacagagttttaaaaatattttgaataacattcccaatcacatgagtcctctaggaatgtagaattgtgagacgtacatctactgatccaagtaggtaacttcttcaatccacatctcttcatatatcattctgtttttagtcttcttagtgaataaaaataatgtcaattttaaatgtttaatacctaataaatatttgcattttaaatttcactyactattatttaattagcattagtatattatagttagactacatgttctctaatttggaaatgtttccagtgataatttttaattttttttcaaattgccagttttaatgaggggaaaaacctaactttctctttattttgtttatatattcataatagtctacagagttcaaaagaaggcataattggcataatactttagagataaacaaaaatgtgtttacctaaaacaaagtttcttgggcttggcactattgacaatttgaaccagataatttttgttgtgggcagatgtcctgtgcattataacatgtttagcagcatctgcctgtacctagtagatgtcaataatacctaccccagctgtggtagaagatwaaattatccctggttgacagtcattgataactatttaattctttttttttttttttttttttttttttttttgagacggagtctcgctctgtcacccaggctggagtgcagtggcgcgatctcggctcactgcaagctccgcctcccaggttcacgccattctcctgcctcagcctcccgagtagctgggactacaggcgcccgctaccacgcccggctaattttttgtatttttagtagagacggggtttcaccgtgttagccaggatggtctcgatctcctgacctcgtgatccgcccgcctcggcctcccaaagtgctgggattacaggcgtgagccagataactatttaattctgaaacagtaaatttttgttctcatgaagtttttattgctgtcctatgataattacttttcactttaccactaataatarctagctagcatttattaggttctttcagttgtgtgacactgctaatcactctgtaagttaacacttataatcctcaaaaaacccaatggcatagatagaacagtatcttaatttcacaaataaaaattttgtaaaatgatgtataagcatttgtctatcttaattaggtagatcgtttgcattttattttttgtttgcttagtgatcacttgcgaagttattatactattttttaacatgttcatcatgaaatgcattttttttggagttacttggtttccaagtgacatttaactccctaaaatagcatttaatcagtmagtttgtgttgtggtctttgaacatgccatctgagggacaagagtgtgctagattgccttttgacttacgatttttagaacaaaataaatgaaaaagaaaaagaaatgaacatatacataaactgagaagcataactaattgacagcaagaaatgacttgattctcaacactgtaaagtagttgctaaaggcagtagctaatatttattgtgttttccttacgtgccagacactgctgtatgtgtattttacatatgtacacatgtatttatcacactaaacctaggggatagatgcaagtttagcctcattttacagctgaggagattgatacacagaggttgtaaaagtagtttcaggtcacacagtgagtaatagcaaaaccaagtttagattactagtacggagtgtgctaggctgggcatggtggctcatgcctgtaattctagttcttgggaggctgaggcaggaggatcaattgaggttgggagtttgaactcagcctgggcaattgaagccagcctgggcaacatagggagaccctatctctacaaaaaaattaaaagttataatagctgggtatggtggtacatgcctgtagtcctagctactctggaggctgatgtgggaggatagtttgatccccagggttcaaggttatagtgagctatgattgagccactgcactccagcttgggcagcagagtaagaccttgtcccccgcaacaaaaaaaaaaaaaaaaaaaaaaaaaaaaaaaacaacagtacgtgctatattggttttacagctctacagtgaaagtgaaaaagtcaacttaaccttttattcatgacataagaggtagtcagtatgcctaactcccactaaattatttgtaaggcgagcttgtactgtgaactttatcagtaaaatctattacatggtatcataatataatggaggaattggtcaggattatggatttttgtcatatttcgcccttaagcatagagaagaacagaacttttggattaaatggattaattttagtgtatgtgcttatactagagagagaaaaagagagaggaagaaagaaatctaggttgaataaatactttctgacataaagaaattttgaaatatggaaattatyattggaactccagtggctcacaagatagtatttaattattgatatgataagatcactcaatatgctgaatgtgaattttcagaacaaaagagaaatgttaatggyggtttaatctaagagatccaatttgtcaatcaatctcccattggacttgtagagaaaacagatggcaacgatgattccctcattgctaaactgtcctaatcagggctaagaagaggagcaggaatggaaacttrggaaacctgaggtacagaaagcggcatgagcctgactatttcttagcaaacacaagtttgccttttctgggagacctgaaataaatgttcatcctggttcaaactcccatggtgatcctgacctgagcttagagttgctacaaaaaaattcacaaattttcagcagaaatgaaataagaatttcaaaagagactccgaatttgatgagtagaacttaygctttgcatttctgtaactgttttgggaattgcaaacctcatggtattactaaattatccattccctattctaccagtgttggtttgtattctcaagatatattgattgccatgaaagcaaactaaagccacaaacaaacctatcaacctagcagtccaaccttctctggacattaaatttatatttttaaaaaactatctaaaattcagaataactgccactaggagagtggagaaatttggcaacaaatatagcttaaccacacaccacacaaataacttttttattataagtaactgagaagtttagcaattagtacatctacttaattgcattttaaactgtaacgtgtttcttggcccacctttctgagacatgtttgttgttgaaaataataataagaatagggttatttatttcctggcaatgtcctccaactagcttaatgttgaaatactgttttttttgtttgtttgtttgtttgtttttgttgttgttttctaaactaatagtgcaggatcccycaggtctttcagaatctagcatttcttttcccctttccgcaaggattctggcatcgagatttttatgttgatgatccacctgctccaaatgtggcctggagactagtgctactaggggaaaattcatcctcacactctgctgttgccaatatcacaatccagggcctacttaatacagtaaaatgtctcttgcaacccaacaacactcccaggcatctcaacactaaaccttacttcaccatcattgcaccctttgtcaagtcagtttccctttagaaaagctgatgatcttgtatttattttacctattcttttttgcagcccttgtctccatgatgtttggcactcagacacatggaacctggcagggtgtatctcaaagtcatgtctccatttagaccttaaattagaacttacaacaaatttggggtgttccatttcagatggtacccagtgaggttgaaggttggatcgtattgttcagagatggagtggatctaactagggcaattagctgtcaggccccaaatgtccaggtatatttccttatgattaagctctttaagcaaattgaccaatcttttcccaccctgccagcccttcaggctgccagacatagaatgacatagctgagatggctgaaaacatgagcatatgtatttatttgtaatactgttgttttaattatccaggttgagaattagacaggcgggagacccaaatgcaaaatgaaattttaccttaaaagatcggtgtggtggctcacgcctgtaatcccaccactttgggaggctgatgtgggtggatcacttgagcccaggaatttgagaccagcctgggcaacatgatgagatcctgtctccaaaaaaagttttaaaaattagccagttgtggtgacacctgcctgtggcccttcctgcttaggaggctaaggcaagaggattactggagcccaggatgtcaaggctgcagtgagccatgttcgcaccaccacagcaatccagcctggagtacagagcaaaaccctgtctcagggggaaaaaaactggtaatacattctgaattaaataattactttatatttactatgaaagagaaaatttcagataattaccagagaaacaaaaactaaggaaaaaaaagaaaagtggctctttaaatttccctacagactaattaaatttatttttctagctttgcttaatggacggatacctttgtgaattttggatctttaaaatctatcaccagtattcccataatttattgttctccgtcattagattgtaaacttcatgaggtcgagctctttattttttcaagtccaaatcccacaccatatatagcctaatatattgcagacaacaatctctaaataaatggtaaatttttgaggtgaaatttattctggagattgatgattgcagctacttgattttgagagttgtagacatcttataactggtttaaatgagaactaaacgatatattccagaacgactgaaacagttctctcttatccaattgcatcctttctgcctttcatctttctatgagagtgtctcacattgcrtttaatctttacattggctaaattctaactaaacaaaaatttcttaaaacataaatgaaagtaaagatttttttyttagcaatgaccaaccctctccctagacagcctacttttggtattttgggactgattgctagaacttccatgaaaagattaaataattttttttttttttttttttttttggtgagatggagtctcgctgtgtcaccaggctggagtgcagtggcaccatcttggctcactgcaacctccacctcccaggttaaagcgattctcctaccccagccttctgagttgctgggactacaggcactcgcttccatgcccagctaatttttgtatttttaggagagacagggtttcaccattttggccaggatggtctcgatatcttgacctcatgatctgcctaccttggcttcccaaagtgctgggattacaagcttgagccaccacgcctgcccaattaaaacaacatttttaaaatccagtctaatctctttattttttaaattaagaggaggttaaaataactrgtaaattatatttatttatttgtaatattgttgttttcattatccaggttgaaatttttaaaaattaaaaattaaaaattttatttaaatttttttawttttatttttaatttttatagatgcatactagttgcatatatttatggggtacatatggtattttgttataaggatacaatstgtaatgattaaatctgggtaactgggatattcattacctcaaacattaatcatttcttcatgttggaaacattcctggttcttacaagatataaaatttgagacattcagttctcatctctgcacaaatggatctgttttttctttttcctatgtatacaactagcactatagagccgttatctaggaacatctgttagttgcttaaaccgggtctcctagaatagtgtctctcagtattgttrtatctgtgatctgattttaggaacttgttctttagtcatttattcccacctcaatccataagcaaaaaacacaaacaacaaaaatggactataaacaattatctgcaataaaaaattataagtataatttaaatatctggactaaggaaaggataaattagaagaacattagaaattaacatagcacagtataggccgggatgttgcactatttttcccaatacaacagtaatcaccttgaggtcaggggctattgtaaatttcacattctcctcagtatttgacatagaacctacatataatttggcactcaatacctacttgtttgtttcacttaggcaaaaagtagagcagaaagaaaatgtttgccttatgtagcatgaaacactttctttttatgggtgagatcatgcccatttaagaaccttgacacaattgcaaagatctagggaactgtaccattctcaggttgcttcacttcctggctgattttaaacacctggaggaatgaactattgaaaatcctttgtgctgtccacaattaagtttgggggcagcctcacaactctcagcatggatgctaatttccaaattttaacctgggcccttaagggatggaattggcttacctgatatctctttagaagaaatgaacttcaacgtgacatatattcactaattattattatttcttaattctgttaaaacataaaagatgaaaggctaaaatgtaattctaattggcaaaggaatttcataccgggaaggcatctcttgattagcagctgtgtaggcagagggagggttgggggtatggaaatttggctaagaattcacacagaaaagtgctcgatgtgcttcgaaatagctcaatcagtactcagcgtgctgtgaaagcgctcaactggtgctcaacttccagcatatttaaatgagtggaacgcttactttttaaaagtgctcaattgggagtgctcaagttgtggtacctattagttgaatgctaattaacttttccttttcatatggttcacttctctgttaagcaaacagatagttttgctgttcatgttttgaggttaaacctggactttccatgagacattaagggatttgtatttattttcgagaaggaaattataccatcaactattccatcaactatagcttttcctttgcatgctcttgcatgcacgttctcgctctctctcggtctctctctctctcagatttttatattatactcctcactatttctgagctttattgttttgtttgaagccattttgagaaaactaaaagagcagagctagatgtgttatttgatctgatatcttttattcctgatacataggtttggtttttcccaagtgtcttttcaatcattttgataacactgctcttcagaaatagttttgagctttaatttgagtttaagaaactgcatagttttgtgctatgtttctaaatgtccactttcacctttgttgaactcattactatcttacttttttaagttggaaagatgaatcctgtaatttggtacataataaagacttcattaactaatctgtttaagattgaatttgagctatatgttttgagaatgcactttgggaaaaaattactatgactttcaattatctcactattgccatgaattaagatgaagatttaaatggatttttttttctgtaacttcagaatttctttcctaggcagatgctgggcacattgtacagcattgcacaacatggcagttgtgtcctatttcccctaattaccaacagaaagctatgcacgggtgaagaaagccttaggaacatgctcctataaatggagaaaaaagaatgccaaagctttacctgtcaaaatacaaactgtcaaagactgtatttcagtttaattcttgatcttctataatgatgtggcaagctgttgttcaaagtaaaggttaaggaatatttaggcaaatagaaaagtagaattccatttgcttcacatarcaacwgaaaaagaagaatgcatagtctcacttttagggtgaataaaatgtaattttaattagcatctaatgcaggattaatgcattagcctcctaactcatctcccagttaaacacattctaagacagaaatgcctttcaatatatgtcattgaaaggccacattaggacttcttaggctggaagtcattgaaaatgtgggtcatctaatgcccctgttctgatttaggttctccaaaaaccttctgattttaattggcttccatataggtctactgtggagaaagaataagtgggtcagatgaatattgtttagaaaataagttagtcatatttcagtatatatgaaagacttacaaatctcactgaaaatgaagaaatttgtaccatggctttgaattgcgatctgaattttgtaaatgtgaatctgaactgagtaatgggatggtgcttagtgttctcctaatagcaattttctgagtctacagtcctaatggcctgaccttggatggtggtgaattcactaaggtaataactatcacaacatgaaacctctttaaagaaaacttgctggatatcaaaattctgttttaaatttttctctttgagtttaaattgaatttctgtggtgttttcacaaaagtgctatgctcagttttatgaacataatgaacatcatttttttttacctttatgcaaatattctcagccactattaaggcattttaatgaaaattaaaatttgattttttagcaacttgcagtagcttataatgataatattgaatcaggaatatattttttgcagaacaaaatgaaggaagttgggtagtagaggtcccttcaccaattctacccagtggctataagaagcaatactgggttattgctttgctgtaaaataagagagaaatgtatgcctcgttgcccctcgctgtttggcgtattgaaacttgcctattaaattaccctttactgagtttcaccgtgctctctctgaaaataaaagctaattcagctttcctatatttatgataatgaaaagtaatatctaaagtgggggtttactgtgcaatcatacattcaagtgatgtatttactttcataaactaaagaaggtatttaagtggtttgcattagttttaaacaattatctttttgtattcacttgacctagttagataatgatgtgcaaacagatttgatttaataacacattagtaaaatgttcggtgaagtcttaaaacaactgcttttaatattcctgaacaataggaggctttgggttcagtctcctgtgaggtgtgtggtgcttgtttgcaatcagctctgacattttcagagtcttctactacaaagagattctattttgaaaacaattattagggagcagctgaatgtgtatcctccattgagcactaagtttttgttgttttcagttgttggtggccaagattaagaaatgattgagaaagcttccgtgtgtgccatttgatagttatacaagataatactttttcactttttaaaaatatctttcccaaattgggattttgtaatgtattaatatgctaatgactgctatgactgtttgtgtccttcctctactgtatgatctgctttctagttgaaaattaataaaggctcccaactggtccaaagttttcatcaatatgagcagatgttgctattgtttgtttggctggagcatttactttgaaagatatgatctgagtttgaaaataaactaagccctagtcctatttttgtacagtggcatcaggaaaatattttgttttgtttttatttcagtagaaaaccaagaagagttaccttatcaattttaggatgtgaatttcagaaagaagtcatgatggtgttttgattttattcttatatcaaaatcctgccaacaataacaacaaaatacttattatatgtggatcaaatgacaatgaacttaccactgctttttataaactgtgtggtatgctaaaatttccatcattttatccattttgtaaaaatttaacaatcttgtaatacaaactatatgccactattcaaattaattacaggttcatttaaacatcataataaccccacaggataattactttactattattatgcccattgtatagataaataagctaatgtccaggcggttgtatagcctttccaacgtcacaccacagatttttaactcaggcaatctgcctccgcaggctgttcttgtatctgctaaactatcctgtgttaaaaattccaacagttattgkgtgtgtgtgtgtgtgtgtgtgtgtgtgtgtgtgtgtgtgtttaattatcctaagaatgctaacctcttggatatttttaataagtccttgctttaatggtaagacagtggactttctagtagtgatactgttattctttgactgaaaatgtggccaaagcttctgaggaacatatatccaaaagaaagagagccttccgaggcagctggatgacatgacaatcctgaagatcaatgagatgaaaatgtcatactgccacattcatttcatttaacctttaagtttaaaactttcaatgaaaaggaatcactgaaaatgttagcatatagtgtaaatactgaccagtcttgtttattatcttacataaaaataatttcaataaattgtatataaatgttatatatccattatatatgtaggagaaaatgaattctaaaggagaaacaatagaagaatctgtggttgaggcaaatttatctctttaaagatactttattgtttagaatcaactatagtactaagtgaatacgacttaaatttgtgatttaaggtgattccacaactgaccaagacatcagggagataaaaggaacaatgatcagtagggtataaaatactatccaaatcttaaaggcaaggtaacttatttcatcttgttaccaaaaatattaaactcttgctttcctttaagaatatattcataagcaagaaaaatgtggcctcttctattgcatagtttataatctaaagttgttgattatggcagacaaaaattaatatagaagtgtaagtacatatagagaaaacaaaatatataattgtttaaaatcttggactgtatgtcagtagtttaaaattctaaatgatgaaattaagcttataactgttactcttgtagccagttgatattcgccaagtcatgcttaacccttctcaaatttcagtaggaaatcaatattttgcagtttgctcatcttaagcagatggttatagcaaaacctcagcttgagtttatttatccattgaacttctggggaaaaaattaatgcaacataaaatcaaataaatatttgaataatttttataggcattattatgattactatgcaggatgatgccttgcccttgagaaatttgcattttatattaagcaatcttccattttatacgactgctgcttgagatgacacaaatatatcacaaggacctaatattttaggcctagaaggaacctataggacagctctgtcaatatcatctaagcaggtgacaagcaatgtcatatctatttagtgaagcaagtaaacagaaagaggatttcaagatagaaataaaaggtacaaggatgcacaaatgaaccttgtatgtggtttgagatggcaataggacatgcaatttaggctatcttgtactgctttaatattaatggatataaagtatattgtacgtgaaacaaatgagtttcatctccatgaaactgaaaatatcatgggggatgttttaattatatcatcttctgtaacattttatcatgaaatcaaaacatgtgggaccactatattttacatttatctacctcaagagtgatgtttccaaaattaaaacacaaatttattataattaggaaattaagtgttctttcagaaactcttcatgtattttgtaattcacatgaagttgagctttttgattttgaacataaaagtctagcaagaattttttcttcggttttttttttttttttttttttttgagatagggcctagctctgtcacccgggatggagtgcagtggtgcaatcttggcttattgcaacttccacctcccgtgctcaaaccatcctcttacctgagccccccaagtaactgaggctacaggtgtatatcatcatgccctgctaagttttttgtatttttggtagagatggggttttaccatgttgcccaggctggtcttgaactcctgagctccagtgatccacctgtctcggcctcccaaagtattgggattacaagtgtgagccaaggcactcagctgaatttttttcttaatttagtataggtatttgagtttgtttttgtaccayatttatgttgtaatctacacacctaagaatattatggctacatgcttatattatgccccttgtgctctattacttatgtttactacttatgtttgtaccactaaagcttcattaaatctctgtattgccccattacagcatatccagccaaaatatttaatacatgaatttgcctcttataccctaatctaattgctaccctgacttcctattgtcaaattgactcattgaatcttgtcttcagatactgctgtaactactccctcagttaattacacctccagtcattcaatttttcaggccagacaaccgataatcaccttttctcatgcctcacacaacttcactgttctcacagttctcttcctatctctattgccattgccaacagctttcttaaagtatttgtgagtcccaagtttcttttgtgtggcttgttactttaggttgctaactgctgaagtctaacttcccttcaaaactccttcctaaataatgtccaaagaatctttctaaaatgcaagtaagattagatcactcctttacctgaaatcgggtcacagttgtttatcatctttatggtcatctccgtactcctcagagtggcatacaagtcctttctactttcatctcctgctattctttcatttactctaaacattttatagttctctgagagattctctgctttcctatttatccttcaagactcaggttgtataaatcaggctccaatcaaaaacagatttcacactcaaattacagtatctcaagaagagtataccacagtgaatctgtttacaaaagtttgggcagggtgtaagtaagacatgaatgttaatgcaattatctaggttaacacaaaaagtaagagctattacaatcctaaacccagaggggtgaggggagacagtggttatctgaaaccagaaggaaagacagctctgtagtaaaggctgactggagaggatcagtgaccacaggacatagcaaatttgcaggcagagggccaggggaatcaatacactgaacacattattctccccattggctgaacctcctgaagtcagaggcttccatagggcccacataatctgccaggtcaggaaaccaggggggatgatggaggtagatctggagagctaatagaaagtttcctaaaacaaatctgttttagattctccccaagtctagttagaaacttcctcctttgcttttccatagtccatactgtcctattataacacttgtgttttatcgtaatcaccttttcttggtctgtgtctttctagagcacaccacgtcctaaggcccccggaagacttttcccttacccttccattccaataaacttaaatcagcatcaaatattgtcttttatttcactgaggccctagactgtacttttgaaacacacacacacacacacacacacacacacattcacacacagacacacatagctgtaaattattgtagttacttgcagaagataaaattgtacaactcaattatataatgggaaactaaacattatgagaaacagttaatgttatgaaaatgaaagtatataaaatatgtctggatccttcttggggtgatcaagaatgtttgtaacaatattctaagtaattgcacatagcatrtaaaggaagaaaaccaagcaacatgccgttgctctctaataaagtataaacttgaaatagatatatgcaaacaaaaaatatgaaacagaagttacaaaaaaagtatcttggatgtgccaagtaagggtttgatcgtctctgccatcccttaatctccattggaaaccatatcattttctttcttttcttttcttttttttttttttttgagactgagtctcactctgtcacccaggctcgagtgcagtggcaggaccaccgctcactgcaagctacgcctcccgggttcacgccattctcctgcctcagcctcctgagtagctgggactacaggcgcccaccactacgcctggctaattttttgtatttttagtagagacggggtttcaccgtgttagcccggatggtctctttctcctgacctcctgatccgcctgcctaggcctcccaaagtgctgggattacaggcgtgagccaccgcgcccggctggaatccgtgtcatttttttatggacagttggcatttgctcaattttatgtaaatgcaataaaaatacaacttcatctattcctccaatgtatacagtaccccttacctcacgtaccctctgacatagaaattctgaagttgccattagaaatgttactgatacattacaaataagtcaaggatacagtgacaataaatatgatagaaatttgtatagtcaccttaacttagtgttataaaatatgtcttctctgatactaactttgtagcatgttaagcaaatttcaaaatattgaaaggtctatgccaatcaatacatttcacataaatacagcagtattatgctctaggttcccagaatacataaaacttaatggctagacatgttagaaaatattaaggtaatgctgtttttgcactggatctcattcctatccttgagatgtcatatgtttcagtaaggtcacagaaaaacctcacctcaaatataagattatatccatgtcacattttgacaaactgttttagtctctggagaactgtctgccttctttatctacaaagtttcagtacttctgctggagaaaatgcatttaagttttcccattttccataattcagtttattttaatataaagttttgttttatattcaggttactatattgatatgtttctgttatttattactattttgtagttctatttattttgtgttattatttcttatcattatatattttagttttattttccattgtgtttaattaataggtatctgaggctgattttagatttaaaattacatatgtagtctttctcccttgtttaaccttgagataagatttatttaaacaaattgcatatgagctactcctaaaccaaataagtttagttttgtgctataacctggaagcttgataaagtggatcctagatcctgatatcctggcagttaccttgactcaaaaagtgaggaagtaagacccagcattcagtttcaagcctctgagatatcatcatgaaagaagaaacaaaagcaatgatgtctgtatacttaaaatagaaaactaaggtatacagggtattctttaaagcttttgaaaaaaaaagtctttaaattatgtgttgaaatgattacaaaaatttataaccactrcagagagctgccaagttcatttaagattgattaaaacaaactaacttatagtctggatctatttatctgaggaaatacatttttacctgacactggacacatttaaattactgatagttttagctttggaacatggcttgtgaaagctcctgtcataacagaaaattgtgcaatagggatttaacaggtttttttgtagcattgtgctatagcatgaatattgtttgygcttattacaagtttctggtgatcttgtttgactttcctacacataacaagggatttggacagttggaaaatctgtacaaatagtaccacttgtggtttaatatttaaaacaaaatactgtggctgcagtgtgctggcttatgcctgtaatcccagcactgtgggcagccagaccagcctgggaaacatagcaaaaacttatctctacaaaaatacaaaaattagctgagcatggtggtgtgtgcctgtggtctcagccacccaggaggctgaggcatgaggatggcttgagcttggaggtggagattgcagtgagccaagatggtgccactgcactacagcctggttgatggagcgggaccctatctcaaacaaacaaacaaaaaacctacttctcttttaattttccctattgtttcattgagagatgtattaatctatctgggctgctatcatgaagtgcccagcttataaacaacagaagtttatttctctcatttatggatgctaggaggtccaagatcaaggtgctggaagaaatggtgtctggtgaggccctgcttcctcagtggtcatctttttgctgtcacctcatatggcagacggggtgaacaagttctctggagtctctcttataagtacactacaccaaataatgaggcatctaccctcatgatgtaataaccttccaaagtttctgtctcctaatattatcacctagagggttagaatttcaccataggaattggagatgacacaaaccctcagatcatagaaagttatttttaattgccaaggtaacaattataacacagtcatttctggtcgatatgtacttgcataaacaagacttatttttcatgctattcaaccacgtcagaataaagaaacagactgaaaggaccgtgaggtttctaaacaacgactgtggttgccacatgtgtatcaagaactgtgaaggttcaatgtgcaagctgaaaagtttgctggatactgtttaataaacaaaggaagaagacatacgtctcctaggctggagagagagaattttatttttcatagcartggcagcatccatagtatcagcattcacgttggtttcacatatttcccaggtcacacaagagacagggtggaggacccaaatggatacacaataggtttgcaacacagttgagaaatctgtgattaggaaactcaaatcttttataataggctgcaagaaatcccatgtcttgccccagaaggaggcagtaagcaaatctgccttttgctgtagaagtttatctaagaaaatattagctgaattaattctatatattttcttatcagattgcattagaaaaaaatgttctgcaactataaatatatgttaaaaccacttgttgaaacaggacttaaggacacactacttagattaaattattttgcattacaaccaaatattttactcttaatcaccatgttccttgttaattatttcataaatataacagtttccatgaaaatcaaaccatcctagtgacagtcctgaatatgaatatgctctgttgatgccacttatgttatcatctttatataggaggccaatatggcatggaataaaggagataaaactatacatattcaataaaattgtagaaaagaagtttcctaccatgttgcatgtgcatgtaaatcttagttgcttcttcagccaagaagtttgaattttgatgaaggtgaaaatttggtataagattgattattacactattacattccactttagaatagtatatctaacttcttaatttataaaaaaatcacatatatcattaaactcaactgttttatttaatgactaaattttcatttatttaagacttgaaacaagtatgaagactttctaggagcaattatgacctaccttgactgctctaagagttttcagaggattattctaacatctaaacacaacatagatatctgtgaggggagcaaaatacatttcgtttgcctatcttttatttgcattgcatatgagccatgttctaagtgatttttttttctatatagattttaagaagtttttcttaaaggacattacaaatttctaagccactcactccagcacagttcttaggaatgtaattatgaacaactaaagacaaacgttataatgtaatacatttcctctaatgcaaaattagcatgcatctgaattacttggagggttgggcaaaacatggatttctgggccgcaccccagtttctcattcagtcatgccagataatttacatttctaacaagttgccaggaggtgctcatattgctggtctagggaccacactttgcgaacaactattttaaataaaagagactcaagatgatggagatgaagctgatgaagatgacagtagcagccaacacaaactaagtgctgtcctgttacttgtcagtttgctaaattctttatgtgcataagctcattatgtgttgtgattatttttaaggagaaaactgaagctcaaagaggttagacaaattgcccaagatcacaaaattgaaaagcatcagagctagtttttaagctgaggcttttctgacaccaaatcctgtgcttaacaaagaatagaaataactgcagtccataagggcctttggctctacaaagcaggtgggagagatgcactgtgattcaggagagccaggcacaacctgtggttcctagtaaggggtgagaattttcatgtgtaggaattagcccttgaaatctaagtacttgaataagtcagaaatagcccaaagtcataaaaagcccagaagcaaaacataaatgacaggataatcaccaaatcaggtcagaaccagggtttcttcatagttttaatatttaaaaataaatggcttctgttgcttdaacaacaatatttcttcatcaaaatactggagactgaaatggtgtactttctgtgctttgtgcccaataaaagtccaaaatgatacatttgctggagtacccataaaaagcaacattaatcatctgcttgcagagacaagggcaaagacaaagtatcagggaacagtgggatctttgtggatgagccttaaaatctgaaccacaggccaaaacaaaaccatctacctttacctttaccgacctgatttctgttccttgatcataccaagcttgtttctcacatatggacattacaatagccgttttctcttcccagaatgctttttattttagtttttacctggctggctccttcttgctattcaggtcttaaaagttgcagtctcagagagacccatctctgatcacccacactttgtagcgcttatcacagcatgttgcaccatatattttagttacttatttgttaattatctttccctccaaccactacaatgaaaactctgttacgaagggaatttttgcctgctttttactactatgtttctagcacgtagagcagtgtctaacacatactaggtattcagtaattatttttttgactagataaatgaaggagggaagaaaaaaagaaaacagacattgtagtagttgaactcttaatttgttttcattttaattattttttatttatttatttgtatttgtatttatttatttatttttttttttttgagacagagtttcactcttgtcacccaagctggattgcaatggtgtgatctgagctcactgcaacctccatctcccaagttcaagttctccagcctcagcctcctgagtagctggaattacaggtgcctgacaccccacccagctagttttgtatttcttttttcctttttttttttttttttttttttttttttttagtagagatggcgtttcaccatgttggccaggcttgtctcgaactcctgacctcaagtgaactggccgcctggacctctcaaaattgtgtgattacaggtgtgaaccacagcccacagcacctggtctactcttaatggatgattcacagggttttcatgccccaaatttgtgcatgcacacacacacatacacacacacacacacacacactttatagtctgtagtgatgatcgaatgtcatgcagttatgtaattatattctctctagtttttgcccctcctcttttccctcaatgcttaaaatagacaaaggtatatatatacacaatatctttgaaaactgcaagcaaattcccagttcaaaatttgttcaatttttaaattagattaaatcacccttgaaagataattcactcagctccaggaatagtatgaattatgtagaaggcctaagactaaatattttaattccacatttcccctatgtcagggaaaccacctaaaacccaaccgcatatttatattcttgtaattaattgcagactaattttattcatgaagttatatttgaactaatagtgacatcgagagttaattctatttggcagtgtatttggactttcatttggtatagaatttaaatcaagggatttgaaaataaagttaagagggcaattcaattttgataaaaattgagtcaatgatgaaagcgcatcctgtaagctctaatgtaaacccagtctttgaaaaatatcatgcatggtacttggaaattctttgaggaatgaaagcttttcatgtgtgatcttcttaaaatggaatttacgttcaaattcaatggacccatgtgcacaaagagtgataatgcatctgaagagtctttctggattctctgtgtgagtgcacttgcatgtgaagagagaaaggaggagagagagagagagaaagagagaaagaaagaaggaaagaagagggaagggagaggttgttaaaggaaagagccactacaggtacctaagtgatttaaamaaaaaaaatcttatacttataaatattgtgcacttagtgtgtaaataaaatgttttgtaatgcttgttcagctactatgcttttcattgggattaactagacatcattcaatatgtttcatttgtggcttttaactcatttatttgctcacttaaaaaatattgagtatttaccatatgctagtttctaatctgggtattgggaatgcagctaagtattttacttccttattcttacataattttctaaactgaaaagaagggaaacttgtttttgaatgtagaatgattgaaaatataatgagattgaatacaaatgtattccgtaaaggtctatgccatattttttggtttaacattttactgtaatgaaatttgatgaattttttaacgtacttataagagatcaagtggaattttttcagtaattttgaataccaatcttagaataaagaatagacttttaagtaaaagtagtcaaaggttacaggcatttatattcaaacctacagtgttatcagtgcagcagagagaatcaaaaaacaaacaaaaatcctatacttcttatttgcagggaaaaaaatcaacaagtgagttgtagtcttaatgcctaccattctagaaaaattactaatggatgatcaaatattttctctttgacctacatgatacttgacactttgtatgagaaaaatgtgtactcagattaaatataatctcaaagcaatccttttaatttcaaactttggaaaagaaaatgtacttttttttgaaatttaatactcatggaaaaacagaaatagtgaaactagaaatgtgacacaatgctgatcacttcttgaagtactgcttctaggatgtgtgaggagggaagagaggacattaaggctgcttgcttcatgctgtgagccattagctgattgctccaggcttcaccaccaacagcagaacagaaggggaggtggccctgatgaaagggaggaaagaaaaaagacagatttattgtcttctctataggatcttatttccattctactccagtgctcttttctaagacattaaataagtacttaaccctttactatttacactccttatgatctgaaacactgggaaggtatttatattttgccttgaaacatcattttaaaatgttttacttttaaatgtttattgagttgtacttacaaatgttaattatagcttcctaaagacaggaatccaggaaactggatttctctatagaaggattatgtaaatttggttcactacaggatgcattactagcattttgaaaatgcctggtacatagcaagtgcttcacaggtgttacctgaatgaataagtggttgctatcttttgtttgtgacaaaattgaataatatggaaggatagaagccatgatgtgtggcataccaggcagcgtacaaagttaaggagtgtaattgtttaatgcctaatgcttaaatgacactgaccatgattaaaacccagctgacatctgccatatgcctctgaataagtgagttaacttttctaaatatgttttctcaaatgcaaagtagaaataacactactgccaacttcataaatggcacaccaataacactcatacactgagaccttagtataaatcttatatattagtatcattatttagagtggcagaacatagcccatacatagaagacaaaaataatctgatcatgaaataaaaatagaagagaccttgcgtgaaggaaaagaagggattcaaaatgctttatatataataattaacttcaaaacctaattcttctttatgtattttatggcagtaaattctgtattctcaattatagcatattaatatatctccaaattaagtatatttattgaagcatgacttaagtgaggattgtttaaaatgcacaaggaggtattartttaaatatgtttattcacgtaataataacatgtataaataggctagttttattcataaatatctgcagttataagtaaagttacttataattccattacagtgttggaatagaagccctgtgaggacagggattttgtctgtttttaatggctatttgtctagtgcctagggcatatcctaattgtggtagatatgtaataaatatttcatgactaaagcaagtaatatagaarcattatatatatttagattcttggaaaagaatttcagcattgctagtacaaatcgatttcatgtaatctcatgacaaaggaaagtttggttcccatatcttttgcttaggcaaatggcatcatgaatttatgtttcagtaagaaatagaggaaacagtcattattttcagggccccattctgttgactaacaattctacacagtcctgaggaaattatgccactagtttgtgacccctcagcagcagatcycgtgtgacgctgctaagcatacattgaaatacaaacactgcttatataatacttctggatcaacaatgcatataaaattcaaaatctccattttcctctcacaggtgctaaccagccacaagggaacctaggacaacaaggaattcaaatattgtcttataagtaacaacctggtgccaggcagggtggctgacgcctataatcccagcactttgggaggcggaggcaggtgggtcacttgagatcaggagttcgagaccaacttggccaaaatggtgagaagttgtctctagtgaaaatacaaaaaaattagccaagtgtggtggagcgcacctgtagtctcagctacttgggaggctgaagcaggagaattgcttgaatacgggatgcagagattgcagtgagccaagatcacaccactgcattctagcctgtgcaacaaagcaagactccatcaaaaaaaaaaaacaaaaacaagtaacaacctggatgtttagcttcaagaaaagcttttatttatgtatttatttattagagacagggtctcattctgtcaccaaagctggagtatggtggcacaatcataactcacagtagccttgaacttctaggctcaaatgattctcctgcctcagcctcccgagtagcttggactgtaggtccatgcaacacgacctggctaattttttaattttcttgtagagatgaggtctcactatgttgaccaggccggtcttgaactccttggcttcaagtgatcctcctgcctccacctccccataggctgggattacaggtgtgggtcactgtacccgaccaccaagaagagctttgatagtcacaaagatagtcttcaaatattgaaatcttatcaagagaagtatccattggtcaattttgcacttcgacagagggcaaactatgattacaagtaaaattaccaaaaaagaaagtttcaattcagtgctagaaaaatatttttttaagagctagagttgccccagagttgaataactcatctggtcagctaatgtgacagttaattctgagtttcagattttctgggagagtctagttgtacatatttaaatgttgtatagtgttttgagtggaaaatttaaggaggtaatttaagattacttttattaaaaggaatgtagtatcaggctctagtacagaacacctttaacctaaccattatatctattatatattaataggattacaaacatttcacactgtacataaatacacaaaacacaggcaataattatagtgtggacacaacaggtagcacgggaataaggagaatatagggtgtgagtatctttaaatctgccattacatctggtttggcccaaatagtctctttgcttataagtgctcactgtgcccccattggcacccttaggaggacaccaagtaggggcatgagtttactcacccctttcagcagctggggagagttattgggccagagagcctgttctggccagctctgcatgtaaagaccacagagatgcagctggttccatctgcatttttcttagtgtctgtgtcctctctgaaatttgtgctcccttgtccctatttgagaaatccctgcaagtggtagcctctttgtcctgaaccctggacctctggctgtctcagaagctttgcatcctggtctagggcatgtagaaactctcaaacccctgaatattacccacagaaatacagtcagaggtcgggcgcggtggctctcgcctgtaatcccagcactttaggaggctgaggtgggaggatcacttgaggttaggagttcaagaccagcctggccaacatggtgaaaccccatctctactaaaaatacaaaaaaattagccaggcatggtggtgcacacctgtaatcctagctacttgggaggctgaggcgggagaatggacgtgggatgcggaggttacagtaagccaagattgagccactgcactctagcctaggtgacagagtaagactcctcaaaaaaaaaaaaaaaagaaagaaaaaagaaaagaaatacagtcagacagaagcactgcctccagctcatatctattcctgccttctgtgtcaccatccctttcttggtgttaaagagatgtgagtagagatttttctggaggctgtcatctgaggtctggtatgcctggaaggggtgacttgaaaatctcaaaatcccacatactaaaaacaggtgcttctatctgcctccccatccttttccatccccttaacctcagaattgcacctcaaaaggagaaatatgaaggcatttaactttaatctcatctccttcaacaggctcaaacttcaaaccagcaataagggcagaaattagacaccgccttctttatattaaaactatgtgataaagtcagccagacttggttcttaataagggtaacaaaaaatagattaaagcaaaatatccaaaatattatagctgtgacacttacaaactatgaatagaagaaaatattagaataatagtgatataaacatttaatttcataatctgagtcatatgaaatataccactgttaaaaatataaaggracatctcacttttcctaatacatgtgaaaaccacttttttattttgaagccaacagtgccaggtcacaatattgtttctggagaaaaaatgattttcatctctcaagatgatattttaatccaataatcacattaaatgaacttgttttgtgtgtctcgatgcacagtaaaataaaaatgtgtcgttgagttctgaaattcttaatttaaatttaataaagtatgcatcagattttaatagacatgaatcagcctcaatgtaagcagtcttcatatagaatgcaagctgtttaatttatttttgcctgttctagtttcacgtggtaaaatactgtgtatagataaacactaatctccaaagtatgaaaggaataatgaacattcaaggaagggcacaaagaacttcagaaaagcaatcaaattttctttgtttcagcttacagagttagagtaaaaatacatacaaaataatataattaactcttcacaatgtaattttaaatctcaaagattaaaccgaagcattttccttatggactatctaattctttgtttactaattttaaagtagacttcaccaggtttggtactttgctttgtgaactagaaagtaaacaataagcaaggcaaaaagaataaaaagggagaaacctactttaaaacaatctgaaaatgataagcagaggtggttgtttactcttgatttaaaaacatgaagacaaagagtacatgattgcttttccaggaaaagcatgagatgaaataggcttgagatataattttactagaaatcaaagaagtacaaaatatttataattaaccacagcttaaattgaacaggtggatacatactggttagcatgttagctcattgtgtatttaaagtttgttaaactatttattgctgcttcaagccagactctggaaccaaatggtgtttgataccaacccttcattgtcatgagccrtgatagtaacagattaagaactgctttgcatggctaattctgatagatgaactgttacttcaaagctagcagtaataaagtctaatcagatgtttaggaaatgttttagatatttcagagaaagggaagatatmatttatggccaggaattaaatggtgcaaaggtgttcggcagttataaatattaccttggaagcatagtttaaaaaaatcctgatgaagataaaaagaataacatgctcaaaacaaccaacctggttgtccatgtttatcagtgtttacttggaggaagaccaataatgttattttgtcctgatatgtcctattaacatttgttgtaagttactttaatgaaaacaaaggaagcctaaatatgaaattaggaaatagatccccaaagtgattgaatattctttgaatagtaatctatgtctaacctatttagataggtggaaatcaaagactcaaaaaagactggaggtaaaattaacaaaataaatacaaaattctggcctcctatttcacataagatgatacaccaagaaactggagtgatcttccacttaaaataactaacagttttatgtacatttttgaaactatcttcagaaatacttccatgagctggtaaaaacaccctggccaaagtcaaatggagcattgaatcggactttcattttgagggcatttgccaaatcaggtaatttgagtactgatttttgcaggctttcagtactcagaggacaggaaaaaaagcccagggctcgcacttgcaatcagagaagtggcagagactagctagtcagaaagctttttcatccttttcctaagcatggtggtgaataatatttcctggcatctcctgagttaggtagcagtgaggcagctgagttctagccgatgtgctatgaatgaaagtgtcatatgctcattccaggccgggacatagcatgagttttctcccttcaacagatccagtggtcatgtgttgaaggtggtagtgtcccagtttagaaggaaagtgaattactgactcaatgcatagggaagagccatcctggagaattccggttctccttaataagttcttatgtataactgattttagttttctcattttatgtgaaataattggaatttagttctcctaagattcttccagacgcaaagttgttggttttattttggtaagaacacatagcatgagatctaccttcttaacagatttttagatgtacaatatagtattattatccacaggcacaatgttgtactttagatctttagaactagtatgtatacctctgacataaaatagacacttggtatttttgaataaatagtgagcaaatgatccctaaactgccattccctgcaaaagtgtcctctatagcagctattcctcctattaattaaaattctattccttcattgttaccaactgattarggtacaagttttaggaaaataataattgaacaaattcaccctcaggagtaatgataccagctctacagactgatcaatattcagttgctatgcaccagcattgcttacattagttgttaaagtattgaaatattaccataacagttcataaatatctgcagcttcaaaccctccagtatttctccccaccaccaccctaacacctttccagagacctaagattttgtgatcatagttccttgattccacaactaaaagaacagtgtttggtgtaaacatccttttccttcttagcatgaaatttataggctaaccttgcctttatctcttctgatttgttggtgctgtcacactagtggttaaatattttgaataccactcccggatagcttggctaaaccgttaaacaatatttgtcatttaaaatcatctactaagcctagatgaatctcttagtgcaatgtacagtaagtaagacataattttttatataataattcttctaggtaaagaaatatcttaaaagtatctgattgaagaaacaagggggtgtggttaataggcatttaatgagtatttgwgaactttctgagaaacctcattatcttctctctgtattcgtggcaaaaaaacaaaaacaaaaacaaacaaacaaaaaaaacaccaccaccaccaccaccaccaacaaaaaacccttttcctctactgcaattctgcctactcgtattccttaggaacccattctctgtccttcttctctcactttataattatctgtaagggttctcatccagttcacctgatatctatttttagatgatccttacatttatatttttttgctcaaaactctcagttcagtattttaacattgtattggtcatctttgcctgggttcctacaatttaatrttttcagattacctacatagaggctccttggtggtctagtggttaggattcggctctctcaaataacctgtgtattcccagtctcagtgattggcctgatgatcctccttttagactaaacttgaaattgtatattcatgatctcaccttctctttattcttctttcattcagttattcaccaagttttcttaattctgcttcctaaatatccttgaaatcatgttatatcttaattcccactaccacatgaggatgttctagccattctgaaaaatcttcatgcctctgcatattctattgctctgcacagaaggccttttctcctccccaacatcttttttctgccttgcagatgccaccattttatccttttatactaagttctaaggtcaccattttaggaatctgtcttgactcctattttcccctggaagtcatttgataaacatctctattactgcacttaacaaattttattgtaatgaattctgaactaagccgacatttcctatactctaagccactttatccagtaaaactgaattatttggcaacagtttatccaggttatctaatagtccagtaagatgacgtaagaattagcatggctggaagatgatagctggaaagacactggagatacatgtacaaataatggagaagggaggggcaagcaagtttataaaatcaaaataacttcatgtggacagagcataaaacacaaaggggacaggcaatagagaagtgtaggggaaaatacaggagagaaaaatgacagttacccaatgctgggaagggtagcgagggcatggggggtagtggtgatggttaatggatataaaaataaagttagatagaatgaataagatctagtatatgatagcacaacagggtgaatatggccagcaataattcattgtatatttaaaaatctaaaagagtagaattggaatattcctaacacgaagaaacrataaatgctcgaggtgatggatacccaattaccacaatgtgattgttacatattgtatgccggtatcagaatatcatatgtatcccatgaatatattcacctgttacatacccataataattaaaaattttaaagattatgaatgaataaatatgtatgaagtacttggaacagtgcctggaacacagtgttatatgagtttatagagtaaataaataaaacacattttatatttacctcttaataaaagaaaaatagagaggacttacttgaatacatatgaaaaattaaagatatggactttgtgttggaaattggtgagaaattagtaaaagattttgttagcaagagaactatatgatcttgctttttagaaatatctgtcaggcagcatagtgttggaatagattggaggggcataatagtaggaacaaggaacaataatccagttcaaatagatgggcgtgctcaaatgtcatagctgatagaaagaaagaagaagattcacaggccctttagatgtagtgttgacagatcatggtgtttggatggggagggtgaaagagagaataagcctgggattctggcttactagaataagactggatataatagacttattaatgaaaatgagaaaaacagagatggatactttggcaagggtggaaatgggtgggtagtgattttgatttagatctaatcatcttgaaggacatataagggatgcacgggagggatccagtagacagttgaatgtatgaacttagagcataggagagagttccagtgtgggttaggcagatttgaaacttatcggcctattggtggtttttaaaggactaactgtggacaagatgatccaggaagcaagtatgaagtgaaaagtcagtcactcttgtttgttgaataaaaggaaatcaaggatcagttctgagctgaggtgaggaatagaaactcaagtggacacaattaagcatcatataaagtagcccctggtcaatagtgggaaaagtatcacagagcacaaacaaaagaatgagactgtgtcctgcactctatttttcttttattttactcaatcccttctgttaaagtgaaattttgtcaccaaatgaatccagatcccatgtacctggtagttgtgttctcagtaagaagaaaatgtagatttcaaccttaagcctatctactcaaattcctgcttcatactcagggatgcctacattatttgtgagactcgaaacaccctgaaaatgtaggctccccagttccaaaaccaggaaaaatatgccatgaaaggtaataaaaggtaccttttcctttcttccacgatctcttcctctactttgattttttagaatgtcctatttaatgtagtttttaaaataaaaatatctaagttttaaaatattattaattttatcattcaacactatattgtgtagtatcagttttaagtgcaaatatgagagcatgtaactcacctgcagaatcaccaaaattatacaatttgtatttcatagcttcgacatgcatatgtctttcattcttactggaaaagtagaaacgctgcacaaaactagtttttactttatttcctgatacatgcatgttctatcaatactatctactcttttgctttactgattactaaggatgaatgaaaggaaaggaagtatgttcaccttatcttacctttgtttctatgttgtcatttttagatgcaaatactcttctgtactcactttgagacttgctgaactctcatgctctctcgctacaccagaattctgcttatgtggcatcataaaggctgtatgataatgaggcaacaaggaaagactgataggcatacatattatacrtatcttctttgcttaaattcatgtttcattgtcccatcagatttcacttacaaaacccaagctcaaacataaaattattaaaattttaagacagaaataacagagcgttaagccaagcatgactacagttgcacatgtagtgttattttaggacataaagaaagctatatgttaataaatgcaaactagtcatcctctattacacaactttctcaatcacacagcattttctttaaggtgacagcaaaagttgtcagttttgtttgttttcaccatttgtgagatatgtcattttgcagacttttctgccactagagggaaagataatttgtgttctctgctgcaattcgttatgcaggagctagggagggatagagaataatgtatgtttgtatagagagctgaagcagcgaatactcttcatgagaagttttatcattttacatttatccttgatatgtgccttttaaaacatgaaattcttttgaagtagrtgaagcctccaatagtaccattatctaaatctgtttttgcttctcattgtcacatgatagcttttcatttagtgtgatgctggggaaagagaaaggagaaggttgaatcaatttattagggccaggtacatatgtggttttttaaaactctcaatttctaccatactaccttaccttgcagaaaagtcatttccatatctgtcatatttgcattttttttgtaattctgaacttctactcctttgttaaataaatgattttaaaaccacacacacacacaaatacctacatctaggaatacaacgatctaccatttgaagagctctggagttcgagtttggcaaagcaattatttgaactccagctgtctttgacagaatgtggaatatgtgtagattattctatgaagtgggaaacctaagtctgtgtctcagatgagactgaatgaagaggtttacaccaacagatttgccaaacaataaatgactttataagacttttttttttcagaaggtgctgaagataacagtgctattaagttgagcttagacctgattctagactgactctaaatgttacatttaaaaaccactcatttttatgttgctttggtacaaagattcattggccattattcttgccttatggaattgtactatataattacttggcaacaatattttaatggtatcatcagtttgtgctttttttttttctactggtggctgagtccatgtccccataaaatactcctcgcaagctgtgctaaatttcctagcagttgcctggcctccacctacacagtggaaaagaatgaaatggcttgaggaaatagatgattgtacttgtrctggtcaaattactaaagaatcaataaggccgactctgtaaggttattgactggcaggctaatctgagcccataactttacttccaaccaatgtttcaaggagtgctggatccaggactatctgtagaagctaagaatcatagtgctgagaaaagcaacataagattattgtattcaagttattgagtgtttttgagtcatccagtcatttgcttatattgcagataggatgctccttcatcatgcctattctgtctctttagtgcttttgaaaaggaattgaggatgagcaatctgccatttcctgtgcacctaaatttatctcatttatcttttttataataagctgatatagtaaaagaaagattactaatacagaagagtcttagctactgtaacacttagagaggattaagttttttaatttcattatttttcattttaaacactgaaaataagacagataagaatttttttccatctgcatttttttttttttttttgcttttctgtttcagtgtacttctagagattaagttcttagcaaagacatcatttatttagtattatcagtacaaatcactagatgcatcaaataaaattgaattttgagttacaaagacaagatgggggtaggataattgtacaaaactaaagtagaattaattccattatttaaaaaatactagtgaatttctgtagytattttatttttgaaaaggcaaaaatatatacagtttgatcatctcattcccgtagaagtcactcacatctcagttgttatcctagaatgtgtttgaacttaggtattcattatgaaatgagaatagaatgagttatctatctgtaactcaaaggatatatagataatctttggcacatattttcacagttaaacaataccagataaaatacatattctgttccacatgggaaaactgtatggataattcgtgagttgtaaaacacaggccatgagcattcctttttggattgacaaggaaacaagaattgtgaaacacargtcatgattattaattccataaagcctaaaatttgtacagtaatcaatatagataaggtaatatcattgaatgcttaagaaaaaattatttgaaaaaccacaaatgaaaaatacaaaaaataaagttttccagttcgtctcgagtcttaaaaaaaagtttgtttacttcaagagataaaagtgacaatagctaaacaaatataattttgttartcttaccttattagcccaaatccaatttctttgagtgatgacaatgctaaaaaattgtgttttcagtgaaattggtgttctgtgtcctccaagtccccctctacctttgctttttggcaaggttcctttcccctctcctctgcgaaatcatagcactcaaaaagatactggagcaatctccttaggaagatcccattccgctgtctacaattaggacacttgttagccctctttaatgggataaaatatgggttcattctgtatcgtgtaggcatttctctaatagagctgttattagtaaattgtgggctcataagtaaattgatattagtgtggatcataagccagtagtatcactgtcacctgggaactagctagaaatgcatattcttaggcaccaagctgatctactgaacctgaatctgcattttaacaagatttttatatgcattaaaatttgacaacactttgtctacaccagaatggtattaacactgaatgatggccaagaaaaaataaaatgtccagttgcaaaactgcctcagtctaaagaaatgatgtatatggtgacagtactaggctccatgtcagggcaggtgaagctaatggctgtttaggactgtagcggtagcatatcatacagtcatcattttctcagtctttgacaaaagttattccttattttactggaaaaagtttacatcataatgcaaatttaaaaaggatttaaggaacagtacatatatttgcaatgacagagaaagggaaagagagagattctgagaaacttttatttamgccctagcagaattttgacctcttagaaatcaagcaatagaagtatggctttgcctttaacttctgaggtttgagcagaaatgtaattttccagcctctcatcatttctgtgacctttctgaatttcttcacattcttcattattactggagtttagaactgagtatatctcactactttcttaggaaaggcyttaattaatatttgaaggaatttgagcttctaattcccacatcctttttaatgccttattttctattacagctgtgccctaaatagtttttaaataattagctgtacatggtaatttatatttttaacaaacttactacataattatcgttcatgtggtctttagaccagattttgaaatactgtgaagattaagcaccagactcaacactaagattttcagggtaaaaaaaataacaattttaaaaatgtgtaaatcatagtttttatgtgactgaaactatcatctccaattccagtttgccttataagttttatttttaatatagcaaaattctccccccttcctgcaatttttgcagtgtaaattgtgcttactaaagttaaaaatattttaagtttttaccaattatgttttcttttatactttaagtttttcttattaatatctatagttatttctaattttttatctcataaaatctgctggaatttaatttttaagacattccaatttttattttgactatggcagcaatttagtcaatttctaatatatttccaaaaaatgatctccctaacatttccagaaaagccttgaaatcctaataacatttctttggaacaggccagttgaggtttttctcatgatgatcatgttaggactgtcatagtggaaagcatcccatttgaggaaagccctccttattctttgtgaattttagaaatttgatctctgaatcctctggaatgaaaaaaatcttaggcagactgacagataacaattttatcagaattgtaataagttaccataaattaacactgaatatgaagacagtgcttaattaaattgtatatattcaaatacatttattgaagaattaacgctgaattaaattagttacaattttcatgcctattagtgacatagaagctcctttaaaatataataaacatgtcagcttaccacatagtagtttcttcaaattgttgagatttaaataaggataggcctgtgttagcgaggaataaaaatattgtgcttcagctcagtagcttccttcttgtgttttctttatatcagtgtgtgtttgtatattcctttttaacaactttataatttaataaaatcttgtctgtaagcttagcaacccataatttatcattatacaactggactaatgaatttattttacaggtacatcatcaacctggaatcatttttgtctgttacatacattttacatgtagaattccttgaaatgttaaaatgtgctatctggagaagggtatcctagaaagaatgatgactgtaccaataattagaaagaagcaagaattttgaaggaaatatgaggagttccatcttcatcatggtcaaataagaaagataatagaacacccaagaggcaatatgagacagctcaaaacacaatattgaatgctgtgcaagattaaatgaagagaaaagagaagggctggtattcattcatgctggcccacacaggaataaamgcacttaccgcattttctagagcataatagttttagcaactcttttgaatctgcttctttctgttttatacatttactttaaaacacacatcttggaagtatcctcttttttaaaaaatcaaaaatattccatggtaaataacatacacattcctttcaggttgtgtgtatacatttgttgtaaacaaatatcttagaattaatattaacatttttctgtcaagatgtgttatttaaatacatatacaaattatatgtgtatttaacagccccacaatgtgatttaatttttatgtgcattaatctaagaacattatggagcatataaaccaaaatatcaagagtggttatctcaagacagtaagattataaatgcctttattttccacttctgattttttttttgtgtatatatatatatatatatatatatatatatatatacactatatatatacatacatgtatattttctctctctcttttaaatagagacgaggtcttgccatcttgcccaggctggtctcaaactcctgggctcaagtgatcttcccacctcagtcttccaaagtgctgggattacaggtgtgaatcactgcacttgccagttttttttttttaataacaagaaaaaaatttagcagaatttaaaaaaagagaagtagttcaaaatagacatttcttatgactgtatattttttatgatgggctgtcattaaatatttagccaaaaaaagaagtaaaaccatatgaaattttaattacttaaggaacaatgtcatgtaacattggtaggagtggctactagtctggaaaataagtttgggcagaaatagtagactgtggcttaatattaaggctacctgcaaatgcccctgtaacataactagtactggacagaatgtaagagttatgaatttgggatgacaaacatggagactcagaatacattatatggatttttagattaatacagaagttatagcatggaatcaggatccctccttaggtaattgccccactcctatccctcttcacattgtcttataattacctattaagttagttctctttatccatggactgtaagttcatcacacgtgaacttggttttctttactgtgcttggtatataaatagggccttaatgtattctggctagatgagagatgtgtgacaggcgaaaaaccaagcccggggggggaaaaaaaaggtaatttagaaaagaaaataaacagagggaaataccgaacaatacagatggctcagcagaaattgtagaaagcgacataaatagattttaagagcatgactttgggactaagataaccctggtttgattttcttctccatgagaatgaagagcagatgtaacgggctaaagtgagtaaggatagcagcactgagtagtggcatcagaaaagcatctaagttttattacaagacaaattaaactcagaatataacaaggctcattcctgggaataattttttaaaacacagctgagatagtcataaaacatgcagttattttaaatttagaaacaaaaccaggacctttaaaaatttatgcttctctgatttttgtccttccaaaattagtctagaaataagtttattgagaagtcagctgtttttaggctctatgttgacttttaatagtatcaaacgaatggtaggggaaaaaaatgaaaataccggttatccttgtttgaggaatctagctttgggagaaaagtgacaaaatatgcttaatttttttcctttcatttttcagatgtcgttttagaaaaacacttagggaggaaagaatgtgagtgatttttgttttcatgccagagcacagacacttacgtgacaattggagtaaataaagtaagctttgactactgttctctaattcatgcgtacctctgatattgacgtgttaaggaaaataacgtatctgcagcccctttccagagaggcactatgacgtaagagttcagagtatgagcactgttatttcacacacctgtgttcatatccttgcttagcaggaagaccctggagaagtttttcagtttctctgaaggctgcattctcatctggaagatggagataataacttcctcataggattgttgggataattaaatgaggtaattcctgcaaagggtttaacacagtgcctaatactagcaattgcaaagaaatataaattattttgttattattatgtaagcagatatcacatcaactgttagtcctcagacttggcaacttacaactggcggaaggagaggaaaggaaaaagagagagcaatgtcatagtaggttgttgttcttttctataaattcatactgcaaagagaagaaaagaccaggagcctgagcagaagcccctaaatatagccaaagtcaaggttattaatagagtgtgggattgctaaagattagaataaatgaatctaagacagaggggacacaggaaagaggagatatgagaatcctctgtcatttacctccctgactttcctttcaggtgtcttacagtagtgaaactggagagagtaaatgaaaggagggaactgttgacagcagagaatcagaataggaaaacttggtgtgcctgttatgactcttccaaaagagcttccctaagagcagagtcccaaaggagaaggcatgaagcatgatgttttagttttgcgctaactcctctttctctcagagtatctgctttttcatatcagagctgagtcttatcaacaatagtagcaacttaacataaatgarcattccataattaaaaggactccctttaattaaaaatactgtgcagacaggaggtgcttcttaaagcttggaagattgatggayggcgcaaaaccacctattagaaccacaaatagggagcagaaatttaaacactgaaaattagaggaatgtcatttgtatttattaatactcaaccaatattgcattgaatatctatattgttacaatactaggagtggagaatactagcaaattaaaggtgttttatcttaaagcactaaatcatatgtataggcacttataaggcattacgttataaaatactagttgtatcttttaggtaaaaggagcaaatgaaagttgagtgggattcacatagcctgcagtcttcatgatttccacatggaaagagagaattggagctagcatttaaacactaacatacgtgagtaaagataaagtgaatgaaaaattgtagtggactgtaatttgttagctaaaaattttagtatctatctattaaagtgtttcttatgctgttgacactttaaagctaaaaatttacattttctcaaaccccaacatctaaagtgggtagaaggagttatagccactggtctgctctctctacactcccttcatttggagaacatcacctgtgggaaagaaaagaagtcaggtgacctgggtctattctccttgtcagctggacatccaggaaaatggactaaaaatatttggagaaagagaccttatctctgcaatgctgtcagcatgatgtgctggcaaagaataatgaaacttagtaaacataaccctgtatcggtaaggcatggccatctgtaaggaatgccacacataaactatagaactatctggagtataaaatgaagatgtttcagaatttaacaatcactgctttatgaggaatcccagaagcctcatgtagggataatgcagggatataatctcttctggccagagctgcttgtcagacatgagaaggaagaacctggggaaccacccttaatgtctgttctctctgtgcttggtctgaggcttttcttgtctgtctccttgaaataagtactaggttactactgagtaaggtctctgattctcgtgagtctgctttgagaatctaaaccagtgtgctagctcataggttgctagatatgatttgggctccactaagcagatgctctgtaatgagccttcaatttgtagtccattaagtcaggagagaggcagtgcattgacaattattttactaatccacttaccactacarttaatgggagcaagttgtgtgcatggtggcggtgagagagtaaaaatcttgtatgtttcataagagaggtagtgaaagtgacagcaagaagagtaaataacatcagaaagggaatgtaaaaattgtttgaattccagctttgttctgagacacagcaagcaattgttgtttctcattattttaaaagaaattgtgtctttttgaagttactcttgaattgcttcaatgacaaattcatactctagaggcaccccattccttgtttgatggctccagttgttgcacagttatattgatacagatctgtctccaaagagattccaaccagcagcctgctccttggtgctaatttttattttgacttcaacaactatcaaatccatcaaggtatgctagtcacctggtttttgttgtcttagttattttagtagttctctatatcgtttttaaaagtctatattgcatcctgaggtctcttccctgaatgtgcttaaatttgggtaggctccttttttgaaaatagatattaggtttctctgcaacacaaccaccaccaccaacagaaaatggcaagaaaggaaataaaagagtaatgaaggatgagcctatagattaaaatacactaaaaagaaaaacttaacacatagtaacacatgtactttatttggatactgattcaaatgagctgcaaaattaatttatatatgagttatttgaaaatttgaacattaactgaaaacttgatgatattaagaaatcattttttttctaggtatgattttagtatttggattatgttttaaaatttctaatattttagagatgcattctgaaaaattttatagatttgtttcaaagtaacttagggtggtggtggtgagtatataaatataaacatatatatggttgggtgcagtggctcacacctgtattcccagcactttgggtgaacgaggcaggtgcatcacttgaggtcatggattcaagaccagcctgaccaacatggcaaaagaaaccatctctactaaaaatataaaacttagcgaggtgtagtggtgcactcttgtaatcccacccacttgggaggctaaggcataagaatcatttgaacccatgaggcagagtttgcggtgagccgtgattgagatcgcagcactgcactccagcctgagcaacagagtgagactctatctcaaaagaaagaaaagggaaggaaaggaaaggaaaggaaagaaaaggaaaggaaaggggaagaaagaaagagaaaggaaaggaaaggggaagaaagaaagagaaagaaagacttttgttaatatttcaaattcaccataataaaggcatcattaaaaagttttagatgaaatctcattagataaggacagttttctctcactagctatacgtcttacttcaagaaagcagctcaaaaatgtgtgtatatatatgtatatttagttagccagtcaaaagaatgaacaaatagataaaaaatatatcactacaagtagaatgtactattaataagaaatcatgggattccataaattaatttattagttatataaataaataatagtcatctcttttaaaatttaaacatgggcaattggagttgactctgttttggctatttccttgctcttagcaaaaataaaaacagagtctttagcttcaacttaagatcttacagaaaaagagaaacagaaccgtgactagagatactcattttttaaggaatcaaattttatatgaaagctattacatatataatttctagggttacttcttaaatcaacccagtttctggcataaaaatactttcactataatcaccagtactgaaaatgtggtccatttgtgcccatgaaacttgctgcatttggctctgagcaaaaggacactggtaggataacaattaaaataaaagttaatattttatttaccttcttagttctaggtcagttttcaaactatagaaacagagcattatttaaatattccctcagatgactaggggatcattcagtggcctcaagtactattttttaaaaaacagtgaataaaaagaacatgtattcactccttccctgaaagttatattattcttccaagtggcttttttcaacacaatgaaatcacacacacacacacacacacacacacacacacacacacacacaaacttaaaataggctaagtgtaaaaattatagaaaatatttattgcctatttttgagcacacaaaccagaaatatgtgtctttattgatgtactttcacacccagttgaaatatagcaaattatcttgaaaaactttgattctttctaaaatacatacaaaaatagttatatacaacttagtaatttgacaagtagtctcgaaaatatgatattcacagtcttaccaagattttaatgtccagtgatttactaactttgttgtttatataacaaattagccctaatgtattcaatatttgattgcttgatattttctcagtaagaagcagatatagtcaatatacatagattgcctaaaataggagtcattgccaagggtcaaatattataaagggcaagcctctttaaaagcatcctttatatcacagaaatagagaaggagttatttttcagtggttgaatgtacagaataatttacaagattgaagtgtataaaacattttatacactaaagctcaatgtgcccacttgtgctgaatagcttattgtggcttgagcttctcatacattctcaaacatgacttaagggtgaatggattcaattatcctacatctagaggcaaatttcacctaaatgtaattgcaggaatcaagaaaacaatccaaacttctactgagatatctgtaaaaattctcactgaaggaatcaagtgattttgaatgacacttataaatatgcaaaatttcatcatattcaagtatgtttcaagctgtacaataacacaggtttaacttgaaaaggaaaacaatgaatgttattattttcatcatgccttgtataggctatgttttttggcaataattagatttcaagtaaaacaaacttcacatcatcacataaccattttattttaagacagaggtttcactcctgtcacccagactggagtgcagtgggcgcggtcttggctcactgcaatcaccacytcctgggctcaagcaattctcctaccttagccactcaagttgctggaattacaggcttaagccaatgcacccggctaatttttgtatttttattagagatggggtttcgccacgttggccaggctagtcttaaactcctgggctcaagtgatccacccgccttggactcccaaagtgctgggattacaggcatgaaccactgtgctgggccccccccttttttaattgtaataaacaatrgaatccagttgcagcaatgtcagtcatatctctggtcatctgatgtttctctgggcttgggtgcacatcacatccggatgtgtgtttcattcttatttccattgagatatagataggtttctctaccagacagttcctgcttcgccataatagcagttttattttggttttgcattttgggggcattaattctgacccaaattctatacatcaaactctaatgtcaaccaagatctgtttctgtgtcataaatccaattcccagaaagaggatctgattggcgcagctttgggtaactgtttccagcatacacttctcctttgaattacagtcttacatacccgactgcctattgcgcacatccacttagatgtcaaataggctttaaaatgtaaaatgaccaaatttcaatgacgattttccttagagtcatgtttgattcttttttttttttaacctatatgcaattcaagaactattccatttagctttacttttaaatatactcagaaaataatgyctgctcggtacttcagcactactgtctaggccaaaccatcatgtactcctgcctggattattcatctctttgcatctgcccatgccacctacggtttatactcagtacaaaaagtagaatcatcttttaaaaatttagatcatgtcacttctctggtcaggtttcctatctcacttgtagtaaaataaaaaggctttgcaatgatctacatggttctgtattacctactttcaacccattacctttctgatcttttaacattttgttctttatgttactcacttggctccagcaatacagactttttgctttttctcacatgtgccaggtacattctcaactgtgtggtctttcctcctgacttaaatgttcttccctgagatggctgcatggctcactccctcactctctccaactctttgtttaaacattgtcttctcaatgaggctttttctgactatctaaaattgaaattcctctcccaatattccctaagcttgctccacagtwtaaatttctcttaagaaattatcctcatctaacattctatatattttactatatgtttattatatccctctattcctttgacatctcaccagaatgtaagcttcatgaacaaacagatttttgtcaattgtgtcctaaaccaggcttccaaataaatgtttgttaaataacttgtccacgtaggacccaatcaaccattcctgttcagtggagggccataggaagaggaggtttacgaagaaaaggatgtcatggaaagagaaaataattactctcatataggcatatattgttatttatttccaaaataaaagaaataatgctcagtatcgctcaatgatttacttagcattatataactaattagtgttagaaagtaaattgaagtcccgcacactcaagttcatagttcttttagtgattttatagccatagcttcatatgaccagaggtgtgttagtaaagagattcaaagtcatcacatttcaatatagctctaaagccaacttgttaattggaaaattgctagattatcattatatcccagtgattttcctattagyttactatttgaggtcatatgaattatctatttaataacagaaatttggggcaaattgggccatgatatccttcctgacctcaggtcaatatatttcatcttcacctacaagtttaaaaacatataccacaagaattgttcaattaaaatgcttctgaagtctacattaccagtgatgtgttcttaagttttgtggtagtcaaaggacctgctaatgtctgatattctattgtcatggatactgacaggctgaagctgtcaggttgggaacatttgccattatttctgatgaaaataatgagaattggccaggcgcggtggctcacacctataatgccagcactttgggaggcccaggcaggcagatcacaaggccaggagttcgggaccagcctggccaacatagtgaaactccgtgtctactaaagttacaaaaaattagccaagcatggtggcacgtgcctttaatcccagctacttggaaggctgaggcaggagaatcacttgaacctgggaggcacaggttgcagtgagccgagatccagccattgcactccagcctgggcgacagggcgagactccatctcaaaaaaaagaaaaaaaaaagaaaataatgacagttgctattggaaaatatatctaatcaaaaacataatacaatggacccacacatttgtgaatgggttgattccaaaacaactatttaaaaagagttatagctatattgcagaaagcatactgccactttaaagaatctaagttaagataaagagaaactttaattgcaccaagaccaaatgagtctcagaagttttgattcaaattactaaagtttggggaaaataaagttaactgataatgagattgaatatttgaattgcatctttaaaaatatcacatcttaaacttttttttttttcagttcaatgattcactattgctctgccaagtttctttctcttaggaaaacatcactaattagaaatgaggcatatttcatgaagaaaatattatttttctgttcttaacaacatgtttcactttttatttcattggctatattgaagagttagaaggaaattgtattgccttaaaaatcaagacattatttttatttatatgtataattagactatttagatgaattgattttcttaatgtgctgtgcttaagaaactagttagaaaattaatccaatagatttttttgaccaaattccagtcagattcaagagaggtttctcaatattaaagtggaaaaaaacagtcttttttcccatttttaagcaccatttttaagaactgagaatttgtcatagagcatattagtgctataatagactaacagctatgagtctttcatctcttaggagctgaaatttatttcctagctcattatatcctaggacaggaaggaaggaaggaaagaagaaagagagggagggaggaagagataaaaagaaatggcaatcaagaaaggcagagcccatgcttactaaagatttttaaatttgataagcttggaattgatgataaaatataaaacttccatgttaatatcctatgtaagaaaacacaaccaacttattatcataacttggcttacataaaattgtccttgttagttctattgtttgtttgttttttgagacgtctcattctgttgcccaggctggagtgcagtggtgtgatcatggctcactgcaacctccaccccctggtctcaagtgatcctccaacctcatcctcccaagcagctgggactataggcatgtgccaccacacccagctcatttttatatgtttttggtagagacagggtcttgctatttgcccaggcctgtctctaacttctgagttcaagcgatctgcctgccttggtgcgctgggattacaagtgttgagccactgcaaccagcctggatttttcttttaggatttttaaatgcattttgtatttagaggtaattaaaaattcacaggtagtcatgagaaataatatagagtaatcaagtatacccttccctggatttcgtcttacataacaagagcacaatattaaaactagaaaactggtattgatataatccatcgagcttattcagatttcacaagtcttacattcactcctttgtgtatgtatgtgtatgtttaactcaatgcagtgttattgtatgtgtagtttcatgtgatcaccgccacagccaagagagagaacaatttcatctaaagtctcctttgtgctattatgatctcagatacctccccccaaaaccccaaccctgacacctggcaaccactaatttactttcgatctccataattttgtaatttcaagcatgttatgtaaatgaaattacacagtatgtaaccttttgagactggctttttttcactcagtggaattctctggagattcatctmagttgtttcatggctgagtaataatccatgtagtccaaagtagtccatagtgcagtggactgaattttgtccctcccaaaattcatatgttgaagctttaacccccgatatgactgtatctggagatagggtctttcgggttaaaggaggtcatgagtggggacctaatctgataggactgtgggccttagaagtagaggaagagagatttctgtttttctctgtcatataaggacacagagagaaggtggctattgcaagccaagaatacagccctcaccggaaactaattggcacccttacctaggacttccagcttccagaacagtgataaataaataaatttctgttgtttatgccacccaagagtgtggtattttcttacagagaagtctgagctaacatacatggcatgaatataccagtttaaaatgtttatttaacccagagcctctgggttgcttccagtttggggctgttatgaatgaaattgctattaaaattcatgtgcaggtttttgtgtgacatactttcttatttgtctagagtaaatgtccaatagtgtaattgctgggtgatatggtaagtgcctatttgattttgtaagcaactgccatacactttttcttggctaactgcattgttttatattcctactagcaatatgtgggtgacacattgtttccacagcctcacagcattcaatgttatcattgtttttttattttagaccttttattttgttttgttttgttttgtttcagacagaatctaactctgtcgcccaggctggagtgcagtggcatgatctcggctcaccgcaacctctgcctcttgagttcaaacaattctcctgcctcagcctccccagtagctggaagtagaggcatgtaccaccatgcccagataatttttgtatttttagtacagacgaggtttcatcatgttggccaggctggtctcgaactcctgacctcaagcgatccacctgcctcagccttccaaagtgctgggattacaggcgtgggccaccgcacacagcataatgcttaataatgataaacatcttttcatgtgggccttactagatttttgaaaagtatattgaaccatattttaaaagccctgtggrttttctttttcaaagatatgcatccaataccaaaaattttggtcaagggatttataagccaaaacatttttactccttaaagctcaattttcatacataaaactcctagagaaataaaatttagatgtttttagactcatggaaagaagaattcgaaattgtagatgtcagaaatcttttttaattggttctggagtcctttttccatgttttgaaaaaaatattatatatgtaaaagtttagttcaaacagctattttgaggagcctggttctctaggaggtgagaagctgtcccagttttcccctccaatccaacaaagcaccatgtgaggataaatagattttcagggcaacactcagaatctgcattaggagtggacctctttctcagacagtcatgagaaatcttgaggctttaactttggcttttaaacatcttcctagatacctgcaaagtaggagctaatagcagtcataataatgggtgcataaaagcaaattataattattggtttaataatcaacagttaataagcaaatgggtattttagtagaatatgttctgccgataatggaaattgatttttttaaaaagaaataaattgataaccacaaacttaattgaacagaaaaatctaaacattattaattaacttggaagaaatatattccaaataagctatagattggataattagaagttgttagtgataagaaatttttcctcaccaatctcattttgcttactgcttttaatgtgatgagcctaaagtgaaacaacatcctaaatcataaatagaaagaattgtcttcctttcattctttgaaagatgatagttcattctgactctccagtaaaagaagtcttatcaaataaaaatgattaaaaataaacatcaaaaaagataaaacatgaatttaacatttatcatttcacatttctgtcagtagcatggccaattgtctacagtagaggttcctagtgggagaagttagggaactaagcccattaaaatttctaatgcacttaggatgtaaccgtagtgtatctaacaaaatcatatattatgatggtaaaattttcatttaaaaattatgcttttctgagaccattgtctttagtgtctgaaggaatataatatatgttttaaatattactgtgcttttttaaattattttttgtagactctcttgacagaagtccagtttaacacagaattctcagccgtattttacctttgcctctatgtttatgttatctctgaagtgggaatatctcatgtgtgtgtgaatacacaacaatgtttgtcttggatttccatagaacatagcgagaattgtgaaatccatgtgtatttccggagtgagggagaggagcctcctaaattatgttgacttcgtttctcaccttgttgtcattagagtccaataacaatacaagtatgtaagttctcctacctagcagaaaaaaatttgctgcgtgataccgatgtatttatggatccaatttaggttactacctttaataattccctgttagtgtgtagtgtgcaagatgagttatcccagttttcccaagatcattcagattatgaagccatatattaagtgggacaaaatccctgtggcttctattctgtggcaaagtgtatacaaatgaggaattgaaaaaactctttttttttgcatttttaaaaaatatatagattgaagtgctttagaagtaaagagacaaactagaaataaacaataaatataatagctaatatttattgaccgggccctgcttttagccttttcatgccatagatgaatcctttgatcctcaaaaacacatctgagaaacattctatcattatcctcattttatggatgcagaaatggaggcttagcctgcttaagttacttaccaaaggtgagagagcaaagaaatcaagatttaaacccacgtatatccgattcttgagcaaaagtgtttcctactttatcatattaaaatttttcacaatacttcagaaacaaactctaaattaaattgtaatagaaatactttcattgagtactgttgattcaacataaaaataactttagggaaaaaattttaaagcatattttatgccaaccagcaggtacatagaatctgtcaaattaaaactaggtagtaaaatcatttttctttcaaattttatcactacccatttaaagttgtcattgctcctttataataaaattatttttttctaaactaccattaactagtagttttagcaactgcaaacattttataagtacagctgtttacaatgattactttttctatatgttaatgctatacagtcatttacccttaaagtatttacaaaagactcaaaattaaaaataaaaaactactatttgtcatttttaaacattgatttttcagttctttacccttagcttgtacctttaatttctctctctttgctaccttcgtccttcagtctatagctatcgtatggttttactcaacttgaaaaaaaaaaaacatataagctagtgagcaagtaaccattccttaaagctgtgctcttccatggcttctattatagattctcccttactaatcatccttaaagtgaaagctactggatcctctttgtcactctctattcacttttcaacccactgtcatgggactttgccccatctgtccaggttaccacaacagtgtcacgttcaccagatacttagagtcctcattttaactaacactctctcacactcaaactgaggatcattttttttatatttagtgcttatattgttttccttgaaaaaagaatttttttttttttttttttttttttttttccagagagaggaatcttgctctgcttctcaggctggagtacagtgatgcaatcacagctcactgtaacttgaactcctgggctcaagggatcctcctacctcagcctcctgactagctggaactacaggaacgtgccaatacatccagctaattttctgcagagagaggatctctctatgttgcccaggctggtcttaaactcctgacctcaagtgatcctcctgcctcggcctcccaaagtgctaggattacacttgtgagccaccacacacagcccttgaaaagttttcaagaagagaatgttttctcttctgtatgcgatgtgtgtgaatgtgtgtgtgcgctgagatcattttaagaaatggagttttaaaaaatctttatgttcttaactggtaaacactacctacctaggttccattatatcctgtttgattaytgagcttttatttctattaagtgtctatgagagtttgtgagggtagcccaaagtaacaagtattctacttagctcacttaaagtgggctgattaccacctagggtataagtcaagatttctggctcttttatttggacctatgctaatagttttgcttgatatatgaaattaaatgatggcgggcactctgtaaaacagagcagggagatgggtttagtaaaatgtagtcactttaatgaggggttgggaagaactggatctgagctgagaatcctactgaggcaaatggcaaagagaaaaatcttttgttcaatctgaaaccgttgggtttgtaacacatttttttcccacataaatcagtttgatatctaattcacagacactgttggacagcacagcaattgcagccagggtagatgggagtgaaagctagtatatcttcttgtcttcgtagtaactgtatcttttctacaaaggtcagtaataacaatttcatttggggactgtaatacagaaggttaaaaatcaaatgaaatgtacaagtgtcattttccttattcttgtttttccttaaagtcttggggagtaagtactattatagattttgaaaattattcgcatgatgtgggataatgatgtccagcagatttaagtacccactggtaattatttatcccgaagaaaatcatatacagaattctaatacatgaaataaatataacaataactaagttccattaagtgtttacaatgagccaggcattgtgctaagtaccttgtacatattaacttgtttaatcatcaraacaattcaatatggtaagaactattatgatccctaacagactaggaatttgaagcttggaagaattacataataacgtaaccaaggtaccacaaaaatagtaagtagtagatctagatttattctcaaacaacactactaatggacacagataaatgtatacctccttcaaacgatggggggactgatgcataaacttgggtggttttggctaggtccacgttttgacctcacagtattttctaaggaaattcccaggaccctctgctctagtgtatttaaagaaagataaaatctgaattttgcattctaactctcggaatacgtgctgtttgaagttctctcattactgaacttccattaaaatctttttaaacgaagaaaaaaggcataagcagaccggaatcatcatttacccagttactcaggttacatacaaccctaaagccaaattggatgctatacttgcccccacagtgtcacatgcaaccmgtcaaaaaagttcaatatttttctttcaccaaatacaggcatattttggagwcatcacacgatgtctccaaaccagaacaaattttctggtttctcagcacatgtaaatgttatgtttgcactatactgtagcatagtaagtgcaatagtatgatgccaaagaaaaaaatgtacatagggccattagaaataatttattgctaaagaatgccaacaatcatctgggcctttagtgagtcaggatctttttgctgatgaagagtcttgccaggatattgatgactgctgactgatcagggtggtgattgctaaaggttgaggtaatggtggtaatttcttaaaagaaaacagtgaagtttgtcataccaatcacctcttcctttcacaaaaggttttctgtagcatgccatgctatttgatagcatttacccagagtagagaagaacttctgtcaaaattggagtctatcctctcaaccttgctgctgctttatcaattaagttgatggaatattctaaattattttttgtcattttagcaatgttcccagcatcttcaccaggaatagactccacttcaagaaaccacttttattgctcattcactagattcaatgcttcattcattcaaatttaatcatgagattgcaggaatccagtcacatctccaggctccaattctaattcttattcccttgctatttacagcacatctgccattacttcctccattgaactgttgaacccttcaaagtcattcatgagtgctgaaatttacttcttctaaactcctgctcatgttgatattttgacatgctctcatgaatcatgaatattcttaatggcatgtagaatgatgaatttgttccagaaagttttcaatttactctgcccaaatatatcagaagaatcacctatttatggcagctatagacatgaaatgtatttcttaagggtgataagacttaaaagttaaaattaccccttgatctatggactacagactggatgttgtattagcgggcatgaaaacaacattaatctccttgtacatctccatcagagctctggggtgaccaagtgtgttgtcaataaagagtaatatcttcaaagtaatctcattttctgagcagtagttctcaacagtgcacttaaatatttagtaaaccatgctgtaaacagatgtgctgtcatccaggctttaatgtcccacttacagagtgcaggtagaatacatttagtataattctgaagggccctagaatttttgaaatggtaaggaatactggcttcaacttaaagtcatcagctatattaaccctaacaggatggtcagccgtccttcgaaactttgaagccaggcattgactttctggttatgaaagtcccaatggcatcttcctttaatgtaaatgaaaatttgtttaatgtagccaccatcgtcaatgatcttagctagatcttctggataacttgctgtagcttctacatcagcacttgctacttcaccttgcacttttatgttacagagatgacttctattatgcaccctcatgaaccagcctctactagcttccaacttaccttctgcagcttccttacctctccaatgcctgaagtttagatttctctgaacttctgttttctacacagcacatagactagtacctgaagatgtaaagattcctcatagtagctggtgaattaatgaattgattttaaaatatagtgtaacaaaccctagtttatcttaataaaaatcctttgtaagaatagaattatttccaatatttacaaaatatggtagtccatgagattatcaagaagtaggcttagaaaaaaaggatttaataaatttcacaagtgtttaagaaacttcttaccaaaataagctttctatttggcctgtcacattggaattcaaatggcattgaaatacttccagttccctttaaacttcaatgtaaaaattacatttttagtgtttaaaatgaagtatatctgataatggtcttctccaaatctaatctaaatggtagattccttaaactacctcatgcaggcctatttaatttcctcttaaattgtcaaaatctattttttagttgaactcattgtgtagatcactttaacagctttttttctgaaaatatctaatgatgttatacctctatacatactccattaacttaaaaaaatgaatttagaactctaaatgtgtgatttttatgtgtgaaaagattcttacttaggcaaactatattctattatctttaaaatagactgcattatcarttcaaatgtataactgatcaaattagaagagagtgatcaaaaatagtcatataggcaactcctaattaatattagatttaactttctctctacttcagttatgtagaaatagtggtttaaagataatgctacattatcagaagtcaaaatagtttttaaaacatgcctacaggcatatttttcaagtttccttattgttctgaagacatggctgctcaaatctggatcttcaaatatttgaattatcagaaacttcaagattctacacccagacatcaccgtccttataaacaatttatcactttagaattgttgccaaagcctaataaaaactctaatcctctctagagaaggaaccttgattttgtctttttcttctccagtgcagtagttttcagagtgtgttccctgaatcagcatcacctggcaaagtgttagaaagcaaattcttgggcaccagcccagacctactgaatcagaagttctgggagtggcgccctacaatttatgtttgcgaagccccgcaggtgtttctgatgcagtataaagtttgagaaagactatactggccttaggataatatctggcattcacaggttcttttattcatcaactgagcagaattaaatcaaaatgagtaaaataaagtaaatcaggtgcctgatataaggaaccagaaattcctaaaatttagttgcctgaggcagaactacataaacacataatatctcaattttcactgatttccagtttactaattaaaaaaaaatgaggtgatccatttgggtaaaattttttaaaaaactctaacttcacaaaatgtttgacagtctttttaccttttatccatgtctgtcaagcttattaaattgaagataatactaaacagaatgtcatgagtttaaaataatgattttattatccccctgtaaagacataaccatgttttcttcaatactcaaaaatgatagcattgaccctcaatcaatagatgtttcacgtgtgatgaatttgttctactacatctaaagagtccctgtagctactaacagcactcaatagagggtccattagggattcttcatggcacccaactgatacattcattcaaacaactacttagtaagtgcccacaaggtacttaattactgccagacattgaacaggatacaaggcaatgtagggcaattctgttctccaggattctataatgtggcctggaattaaaagtaaagaaaaggaaaagggccacacatttttctcataccatcatgtgccaggcactgaatagagcaggagaaataaactatatcagtaaatccatgttaccactcagggaagttggcttcattcccagattacaaataaggaaacaatagtttgagagatgctgagaacttgttcaaactcatcaggtaagaaacaagggaggtaaaatttaaaatcaaaactgatttttaagtgtccactgtaccttacactatatcagttcttatataaaaaatcagcagcaagtcttagaggaatayaataaatgcctaaatgaatgatgcacattatttgctgtagggcgattagaaaaggagcagtaactgtggatgaggaagtgaagccttcccagtaaaagttcaacacagatcttcattgaaagaaaatggtttgtagcttggataaaggaaagaagtaaatgtattccagatgggaaaaactgttaaacagaaatgtgtagtcaggaacaagaaaggcaggttccagtagagtggcaaaaatcagctcagcacatttagttgccaaataaatgatgtagaatggctttgcttggctctagctatgcatgaaggcacacattttaacaacgaaaggggagtggtgaacagtgccacttagctttacttaagtggtgtatttactgcctgtgtccgtgtacattcagtcaaggttttgaagtgcctgcttcttttggctctaattttgtatatgcattatctttcttcatgtaagtgatcattctgctcctctcctctgcaaccaacaggattagttcactttagccatattatttctcaaaaaaaaaaaaaaaaaaaaaaactcacaggtactctttcatatatttctcaagtccctacagctgaacaagttcttaaaaatatcaggtctctggccgggtgcagtggctcacgcctgtaatcccagcactttgggagtccaaggtgggcggatcaagaggtcaggagttcgagaccagcctggccaacacagtgaaaccccatctctacaaaaaatacaaaaattagctgggcgtggtggcgtgtgcctgtaatcgcagatactcaggaggctgagacaggagaatcacttgaaccctagaggcagaagttgtggtcagccaagattgcacctctgcactccagcctgggcaacagagcaagactctgtctgaaaaaaaacacaaaaaacaaaataacaatatccactctcccaggtacttatttgtagttactataatgtgcctgaaagacacaagttctaccatgagtaattcagtattcattcaacttgaataactacagggttaggagagtcattttgaaaatggttaggattattagttagtgttaagaaaatatttttagatagttatggtaggtaaagtatgtctgaagaaaagatgtatttgattgacttatcctttaacttcagtgaatttttatatctctgtatttattttgaatcaaaatccccaggtacaggtaggagaatttaagacaaaatttcaatagcacctctgttttcctgtcttgttacagtcctctatgtggtaagaaatgtttttgtcatttgctttctgtgaatttcaaagtgatgtcctgtgataaaatagtggttcccctaagatcttttatttaccctgggaatgtcattgatccaaaagaagataataaaatcagcaataaaatagtaaacattctgtatgggatatcacagttttaattgactacagacactcaaatcaatttttcaatctgcatacacatgacaaggtcagcaacatgggaagctgatgttgctttcctttataagagatatatttaagatttgtaatataaacatgaagtatggtactttgtatatctctttatatatctcttaaaaaatggactttaaaactgtagatattaatgacacttcaatgtaatttttaaacaaattttaacaaaaattacttagaaaatattttgcttagttttcttacaggttttttaaaaatagtatatttgatgataatgtgattaaagaatacacaccaatttttttatattatactttaacttctagggtatatgtgcactacgtgcaggtttgttacatatgtatacatgtgccgtgttggtttgctgcacccattaacttgtcatttacattaggcatttattctaatgctatccctccccctgacccccaccccatgacaggccccagtgtgtgatgtttcccgccctgtgtccaagtgttctcattgttgaattcccacctatgagtgagaacatgcggtgtttggttttctgttcttgtgatagtttgctgagaatgatggtttccatcttcatccatgtccctgaaaaggacatgaactcatcctttcttttatggctgcatagtattccatggtgtatatgtgccacattttcttaatccagtctatcaatgatggacatttgggttggttccaagtctttgctattgtgaatagtgccgcaataaacatacgcatgcgtctttatagtagcatgatttatatacttgggtatatacccagtagtgggatggctgggtcaaatggtatttctagttctagatccttgaggaattgccacactgtcttccacaatggttgaactagtttatactcccaccaatagtgtaaaagcgttcctatttctccacatcctctccagcatctgttgtttcctgactttttaatgatcgccattctaactgcacaccaattttttaaataaaatttatttttatcaaaatttccygtgtactcagaaaaaaagtgccgtacatataaaactaataatgtaatataggaattgcttctctacatctccctacatgctcttcccactctagcgaagcaaccttcaatttttgttttgttttgttttagctacttttggtatttttcaaatattttaaataaaattttcacactgttttttcttgatttcctagatactgatatctattgatatactaagttgcaagatgagaatttaggttgcatatgtcatctctcacatgaagttacccttaccccccttctaatatagttttaacacatttataactaaattcatattcagtattatcatttatatgactgtctttgtttgggttgctataataaaaataccatagactgggtaatttataaacaacgtaagtttattgctcacagttatggaggctaagaagtccaargtcaaggcaccaacagattgggtgtctggtgagggctccctctctgctttaaagatagcaccttctcactgtgtcctcacatggtgcaagggcaaaaggtgataatcagcttcctcacacctcttttataagggactaatccctttcacaagggctctgttctcatgacctaatcacctcccaaaagccccaccttctcatatggtcactttgatgagtaggttttcatgtaagaattttgagggaacacattcaagccacagtattctactcctggccctccaggatttatgtccttctcacatgtaaaatatatttattccagacgaatagctccaaagtctttttttttcttttcttttttgagatggagtctcattcttttgccctggctggagtgcagtggtgtgatctcggctcttagcaacctctacctccacggttcaagcattctcttgcctcagcctcccaagtagctgggattataagcatgtgccaccacacccaactaatttttgtgtttttagtagagacagggtttcatcacgttggccaggctggtctcgactcctgaccttgtcaagtgatttacttgccttggcctcccaatgtgttagcattataaacgtgaaccaccgcacctagcacccaaagtcttaacttgttccagcattaactgaaaagtctgaagtgcagaatctcatctaaatatcatctaaatcagatatgggtgtgactcaagatgggaattatcctgaggcaaatttgcctctagctgtgagcctgtgaaataaaacaacttatgtgcttccaacatacaatgattggacagacatagaaaacacatttccattccaaaaagaagaaatagaaaggaaaaaaagtggtaacttgtcccaagtccaaaatgtaatgttgcaaacaacattaaatctcaaggctggagaataattcttgagtagatatcctgcctttcaggcacactgggtcaagcatcgggcccccaagtttccaggaagccctgcccacatgggtttgcagaatacaaccagtattgcagctctcacagggtttgcggaatgcaaccagtattgcagctctcacagggtttgcggaatgcaaccagtattgcagctctcacaggttagacttgcatgctgaaggctgtactattctggaatctcaagggtgacctcacccccagagcttcaccagacattgccctaatgggatccctctgtggtggccccactcctgtggctgttcactgcctaggtcctcagactctctggagcttcatttgaaatctagagtcatccgtgcctccacagctcataaattctgtgcatctacacctgtggagatggcactgtgcagatgccatcattgtttaccatctgtaccttgcagagaggcagcccaagctgtacctgggcccacatgagcaacagtaagacagggcaaggagtgctgttccagaatggggagagcagagacttaaaatttttctgttcccaaggtcctggatttctaagcttatgatgggagtggccagcccgatgatctctgagatgcatttgtggagttcttctgtccattggcttgatgaataagagcccctggcttccaccaatccatagtaaccttatcaaatacaaacagtggaatggtcacatccttggtgttctctatttttcatttgcaacattgccaggctgagaattttccagatctttttctgcttccattttgattataattttttctttaatttgtttctctcttcttacattttactataagcaatttagagaagccatgctacatcctcagtacttccaccaaatatcctatttcagtgcttgtaagtttcaccttccacgaaaccctgggacacgattcagtcaagttccttgtcacttaataacaagaatcacctttcctcaagtttccaatgacatgtttctcatttctatctgagacctcatcagaatgacctttatcatacacatttcaatcaatattctgatcacaaccatttaggtaatctctaaaaagattgaggccttccctacagttctcttcttcagagccctcaaaataaccccattttatggtaaattcatagctttttctagcacgtaccttcagattctcccaggttctgcccattacccagttccaaatctgctccacattttaagttatttgttatagcagcaccccagttttgggtaccaaattctgtgtttgtcagtttgggctgctrtaacaagatactttagaatgggtaatttataaacaatgtaaatttattgctcacaattatggagactgagaagttcaagatcaaggtgccaacagattccgtgtctgatgaggactccctttctactttaaattggtgccttcttactgcatcctcacatggtagaagggcaaaatttgataaccagatccctcacatttgtttataagttcactaatcctactcatgacggttatgctcacatgacctaatcacttcccaaagggcccatcttctaataccagcaccttcatgactaggtttcaacacaggaattttggagggatacaaacattcagatcatagcaatagccatctaaacatttttttctagtttcagggaggatctgactgataattcaatgtgtactttcattcaatcatattaattttttgttcagcaccataccgaagtatccacatatccattgattccaaattgctttaccacctgtactttgcagagggaatatggaactaaggaatatacagatagttttgtgtggtactaaacaacaacaccaccacaccacaccacacacacacacacacacacacacacacacacacaaatctcatctttaaaaaaaaaacaaacttcagagtaagatttttttgtttctgctccaaaagtgtgtataaaaaacctgcaatagatcaaagtccttacctcttcatctagtggtaactttttccctttgaactctgagaatgacaccagtattggtggttttaatttctgttgccctctttggatgagcatatttacaactactgaagttcaaacttgtcacattgactttgcatttattttttatattatcttttaaattggcatagtttagaatgcctaatggtttcattctttatatttatgtcataatttgttacctaaattaaaataaaatgtttcaagaaagggaactaacacttttgttttttattaaaataaaaagaaacaacaaactgtattgtctttatatagacttcttgtttataaccttgatatttctagaacttaatatagatttctatattttattaaactacatctcaaaagccactattgatttctataaattgacatagccattgacttaataaagaggacttaattcagctctgcaggaaaatcttattctttatccaagatttgctgtcttttcaacttcattcagaaatttggcagattggataacccttgacattttggtgaaccacctgacaatttcaattatagtttgaatttcaaacagcaaatatttgaggtgtttcagattccaaatcatatccaactctcaaccctaaaaatgtccttttcttggctctcaataacattttttccatttgaaatgtttcctttttaagtttcttagtcatattcaaagctaaagataaggatttttgaacagtgtcaacttttattaggacagagagaaaatacacaatttagcaatatgacctacgctatttcctagctttagagctagatcatcctttaactaattatttttcttttgtgttactgttttaatcataattcatattggatgttttgggtctttgacataattcttttcattagatttgcagatacctttattcataaagcaagtttaagtaaaagaaagttaaggtataattttcaatataatataaatatgatttagaatttttgaaaattatttgtgatttctatggcttacagtagataatctacaaaataatttgaagaatatttagaaattaatcttaatttatctcagaaattttattagttctgagaatgatctggcataattgcaagtattaaaaatttcagataaagttgattatgcatttttaatagtgtacatgcaaaataaaatttaataaaattagaaggatgaagaagcaygtgttttatttttaatggagatttttattcatttttagcacaaaaaatagcaaaactctagatagtctttgcaataatgtactggtagtatgtatgatgaaaaaccatacctggaaagaatgtaaccatgttaaaggatcagttggtaagaaatgttgctttcctgcttcttactactctgtatatcagaatctgaactgccatagcaagctgtcttcctctttgctcacatacctaacttctaaaatgttgagagagattctttatggcccttataaatagaaacattaatttgttgaacgtaattgaacccacaaaatgatttttaaattatatgtaattttaatttgcaacacttatacaaatataattttaacaaatttactctaaatatattttatacaaattataaattgtgcacagagccattattacatatctttatttctttatcactaagtgttgttttaaaaaaaatcttacctttggaataatactgaaaatagcaataaacatttatttttctttttgtcacatcaagatttgtctaattctctcccatgtgtcccaaattgcttttatccaagcccaatctgccctgccatatcaattattattgtcaagtaatatgtaactatcttcataacagtatcaatctctgcttttaatttactcaaaattcatttcaagcatattttatttatcaaaaacatttcaagaaaattttatctctgcaatatgttctggaaaatgccaaccataaattgcttgctcattatacccataatatcttctatctatttctatatgaccattcattgttctttttacaccttcacaatatctctttctaacaacaatattctgccctttatattctacatttgaagacttgatggtgattggataatgttccattttattttcactggggcttatgtcttatgtccccttacagacataaccatgattctagaagacaggaacagtaatttacctagagaggaactgaatccataaccttactaacactttgcttttttaacaaaatgggrcaaccagcaactgaaatcattccatttaaaataatttcacacctcacckaaagaacttgaaaaatgaagccttacaataggccaatattctatttttaggaaaatagatagccttctctaacaaatacatttttctcttaaatccttacattagaaacttgaatgataaacacttcagtgaatagtttacaacttatagtgtaagatacaagattttattcctaaaagcaaaggatgggtakgtcttaagaaaggagatttcagaccaggcactgtggctcacgcctgtaatcccagcactttggaaggccaaggtgggcagattacctaaggtcaggagttcaagaccagcctggccaacacgtggaaaggcaaaacccattgctactaaaaatacaaaaaatagccagcatggtggcaggtgcctctaatcccagctactcgggaggctgaggcaggagaattgcttgaacctgggaggcagaggttgcagtgagccaagactgtgccattgcactccagcctgggcaacaagagcaaaactccatctcaaaaaaaaaaaaaaaaaaaaaaaagagatttctgttgattttaaaattatcctgagctaaccacactgtcatactgcaaatcagggtgaaatgtgtccataagaacaagcctgccgaactaaggtattgcctgccttatctcatgagataattatttgttctgtagtggggtgcatatatttttaaaatgtgttacaccaatgtgtctacaaaagaaacaaatgaaaagcaaaacaacaacaaaaagatcacatcatttcaacaattgtggtgatcaaaaccacagaatatttacttcaagtatgtccttgtccttaattagcacaagaattagtgctaccagaatactcttaaagactctcttctaataattctatcatcaagtcatcttggaaggaaagcttttaaagccagtcagccagcctgcttaatgactgtttctgtagaggaatacaagtagctcccagaattacagttgtcagcccatctccttgggtctgaaggagaccgagggatcattatcaaatagatcatttgatatggtttggctgtgtccccacccaaatctcatcttgaattgtagttcccataatccccacgtgtcatgggagagacccggtgggaggtaattgaatcatggggtcaattacccccatgctgctgttctcatgatagtgagtgagttcttacgagatctgatggttttataggggcttttgccccttttgctctgcacttcttcctgccaccatgtgaagaaggacgtgtttgcttccccttctgccatgattgtaagtttcctgaggcctccccagccacactgaactgtgattcaattaaacctctttcctttgtaaattacccagtctcaagtatgtccttagagcagcatgagtatggactaatatatccttatttgctcttttccttttgtattctgacatgagtaaactgtgaaattgtgctaaatagagatgtatgctaactgtgaaacactgataattatttcagtaaactatgatacatataagagatttaaaacgggtatatgcttctttaaaatagacgaagaaagtcttggcatacatctccaggataccccctgaattataggccacaattgtacctcacagcatttatggcctcaactctagtaacagaaacacaccttagtcctattctgtagttcctaataaagattgattctcaaaataaaaactgactaaagggcagaaatacatacagtaatcttcaagaattttttctctttatctgcctggagttagttgaagcaagctttgacaagtcatttatttaacagtttagcggaactcattcctactcttgaacctggaatggaatgtaagaaataaagagcagtggaatccaatgatgtatttcaggatataattggttgtctatactcaaggctgatcttatcacttgagatgaaaaaagaaaaacaaaacatggtagtggaaaaaagtttatgtttacaaaccctgaaaacttaattcttgtaaataacatcaccacaaatagaaaatatgtgtcatcaaactaatttgtgcaaagctataatttgtgtagcaatgattgaagtataaatataacactttagtgtgttttaaggagtttttttcagatatgctattttctctttacaataggcttgaaaatatagtatttttttctaaaacaagccttttgtctttccttctatggaaagatgcatgtctttagttatttctgctggactattatgtgtggactggcaggtattggcatacttttcataatcctaataagtatccggtgtagccagtctgaaagctcatttagaacaggacaaactctgtcttgcttgttgaaacaactccagtacctagcaatgtgtctggtrcattcttcaggtgctcaacaaggcagaatggctttgtttattaattaaataatatagactcaaatccattcagtccctgaccaggactcttcataaaacagtggatctcaaaatcattccctgaacctacaatattgcatcaactgagaactcgttagaaattaaaattttcagaccccatgccagaccttctaaatcagaaactattggggtaggcccagcaatctgtgtttaaaaagccctccaggtgattataacgtatgctaaacttgagcaccattgatgtaaacaatactcaaatacattgtgcacagctttttagaattatgagagtggcttaagggtatattacaagaagacaattcctatggacagattgtgaataattttaatttctcaagaattttgttctaatttttttatgtataggatagttggaacgtatgttctacttcttacaagtatctttattttaactataggactactcccctcatgtaacaaattgtgtaatttgtataggaaggctgactcagtttgagttactggtacagatactgagacaaggagttgaatgcagatggcttattaaggaggtgttcccaggaagcacaagtgaggaagtggtgaacatgagagagggtaaggagaaaagccagtcaagcatgtgttaacaagaaagggttacaactgtgggcaaataggtctcaatcctgtggagaaccatctgagaaagcrtgtgtggaatatatctcagaatcacccagtggagagtggagagactgaaacatttatgtacttacttccagctccactgtttgagagttgatctccagtggttctaacatatgccatattccaggttatatttgtgtatggccaaataagctggacaacgtcatcaggcagagaagatgagacacagcacttgaggtgggacatgtcaatacactggaaggttgaattgtcactgccttgagaatggaagaagagcagaactgactatatacagaaaaagaatgagggtcagctttaactaggggttagaagccatgaatttgcaataacaccaaagcacccagttgtgtgttccatttctaggaaaggtagaacagtgaattctaagacatataaatggcattcagagtaactctaattgttttataggaagtatgcaatcataaacgctgacagataagcatacatgtaaaatttttaagaaaggttatgatcactaaaatatagcagatgacttcgaaatgttcttgctttatgtgatcacaaatgggctcctttgtcgaattctagaattctgctctgcaagtgacattttgtttgagcagttggcatctggtacctcagtttcaactgactttttgttactaaacacagttcgaacaccgtaaggtaatttttcaatggtaagaaaaggtagtttatacttcatcctagtgaaataactcaggcagggaagtcaattgcttggaattatggaaagtttccatgctatcaagcccaacaccatttgaaaacattttttacagtaggccacaaagctgcctttttatggaagaaactatgaaagaaattttagaaaccccagaaagctccaaggtcctgttctgattcagtaaaaatttcaaagactatacctcctgagcttactttgagaatgacaaaacacaagtagcttaggaagacggacatggaaattcaccttttgcatttccctgcattttcttttggatattttgcacagaaaaacaataaaaccttttgatttttgttttcctgtgaagtcttttaattttagtagaatcatcaacattttatgccactcttaaaattctagaaagcaaaatccccatgtaatactggaaaagtccaaggataacagaaatattgaactaggactgttttttaatgagaaataattagcctccatagtagcttcatcaacgatgagctacttataacagtatactaccaagctacacaaagactttcattagtgtaagaacagtagtagactaattaactgtctaactacagaaactagatgcttaattgccatgttgctttattggcacagtatctaagaatcgtcgtccaatttctcctctagaagcttttttgttttcctcctctggtggcaatgggaagtttcgttgtgatgaaagaacagtaacagataactgtttctctggttaagtgtcaggtgcaaatacttctctggttaaacatcaggaatatacatgtgtatgtgactgtatgtgtgtgtgtacatgaaatgtttaatcagttaaccagtgtagcaaatttctctcattctgaaaagaatatgaaaagtaagtcttactaaaggaaaagcacattttcttataccactttaaggcaaatagtcatggaatcacctgtattgttcaaagtcttctatggtttagtctctttctctatcagttatacaatggatgcacgtaagttaacacagtggagtataaataaataaaagtctagtgtatcccacaaaatgttctgcaacattcagtttaactgtaattctaattttgaaaactacataacaggttctgcaacttagaagcagagggctatgagaaaattttgtagaacatatctttactaattattaactcttgcatccactcctgtttcgctttatgatttgggtgagttactttaactttttgttcctcagtttcttcatatttaaaatgcacatagttgtagtgtttgcatgataaggatgttgtgataattaaatgagttattatctacgtgtgtgtgtgtatataaaaacacatagtgtcatacatagtaagcactcaacaaatattagcttatactattattattaatgacatactgtaaatagcattcaataagcatttactggacagaataaatgttgtcaaacatgaccatttatgagtactgtcaaaagtattacagtaacttgagtgatttttgaacacatgtaatgttccagatgctttagatacatttagccatttagtcctcactatgcctccatgaagaaaatgtcattcagctcatcaggaacctgagactcagagtatgtaacataccttgttacagttaaggaggcccagcatttgaattcaagcccatttactcaactttcattttatttttctagtatcagatagtctccaagtcctgaggtatttggctttgcagattttgaatttaatatttctatacttaattactatataaatagttaagatcttctcacttgagaaaatgtaaattgattcattttctgatttaattttttaattaaaattttttctaatgacttcctttttatatgagcttatcaaatagtttagtcctaggtgaggtatggatatccacagatgtataaggacgagttagggctatatggttctcttatttccgcaagcaacatttaggaaaaaaaatctgacccattcctagcaatccattttattgaaaccctactatgtgtcactcactgtaaagggatagaccagtgaccaaaatgaagtccttactaccatgaagcttattctacagcacagaaagagatggtaaataagtgactctgtgtgtgtttatttgtctcaggtgggataaatgctctaaagaataggacaaaagtaacagagactcatgggggagcaataatggatgatcatagaagtcatgcctgatgaagtcacatgcagagacctaaatgaaatgaaggagggagctatgtgtgtgtctctaatggaagagcaatccaggaggcaacataaggacaaaggctgaactatactagaggaccagcaggaaagtgattacagctgaaccagagggactaaggggttatataaaatacgtacaacatggccctcacagccacttacatagttatctacgatttcattaaggctgggatagaggttggctcagagtgtcaggcaagcataagggttgggataatactgcctggagttagagaggtaggatgggaagggtttgacattttgttcacaatttgagttatgagaaacactttgtcaaacagagaaactgagaagaggtcaaaaggaacaaagcaaagcatgaaagtccacagctgtggagagctcatatattgcatttagacgtgatgaatagacttgaaaaactttattttttctttattggcttcaagatagcaagaaagccttagttcataaatcctagcaattaagtgccaatttacccccaaatcattttaagcgttgatcaaaatccaactaagaactcatattcatttgtttgcctgtcatacttaagaattaatttactctgccaagggtcatttagctattaaaaaataatagctacaagaaaataaatattttagtgtaatttcctgatggtgccaaaagttaccatattagcatatggtaaaataggcaagggatgaggggtccttcaacaaacaccgcttttcctaatgttttggcataatgcaccttaaatcaccacagcaaacgcccaggaaaaccccaatgccagcagaaactcacagagarttaaagacagtaacacagtggtttctgacactggcaatgatttttaaatctttattctcatgaggtaaagtactgaaatcatgaatttgcttttaatcactgttcmatctttgttcaataatatagaacacaggaaagttggtctatgccacatgatgaatgcagtctatctcttgcattacacattaagaagcagagcaggtagcacagtgttggctaagtctcagcggtggcatattttcatctcccacagggtgtgggaagaccccactgcacagcagtaacaataaatctagcatatccgtttatgaaataactttggcagtaatggcaagaggatttggatgaaagtgtatttgtggtcttccagctggaagatcagagcagagattctaaagcaaaaaagcagagtggaatggcagatagtggctgcttggaaaagaacagaagacagttgaggatccatgctgagctcaaggggaaatgcaaacaagacagtcctttcagaatatccccatgctgcccagtgttggcgtgagggattactaatgccatctgctggatattcttgggatttaaaaatggtatctaaacaaataatactccagtctccctatgtcttggcttcagttctttaatgagaaaaacagcaacaataaccagctaaagaaaacaagtgaagaaaacaaaactcaggtcatgtacatgtttcctgtaccttgagaaggttggagtttcgtatggccactgtgtttcagacatagtatttataataattgcatttttttggttggtgtttgtttgtttagttttagcagaactctatagtagtgcactttggccatatgcaacactcaggcaactggatatagtttgaactgtaaatccacaaagcccttgctaaaaatatattatacactataaactttgtatactacatactcccttttgttggagagaacattgtggttttattttgtctattttgtttttaaatagggataaaaataattaaaaggaaagaagmacaagtatcaccatttggtcaaaaacattacataggccgggtgcggtggctcacgcctgtaatcccagcactttgggaggccgaggcgggcggatcacgaggtcaggagatcgagaccatcctggctaacacggtgaaaccccgtctctactaaaaatacaaaaaattagccgggcgtggtagcgggcgcctgtagtcccagctactcgggaggctgaggcaggagaatggcgtgaacccgggaggtggagcttgcagtgagccgagatcgcgccactgcactccagcctgggcgacagagcgagactccgtctcacaaacaaacaaacaaacaaacaaacaaaaaaacattacatatacatttgtgtcatataaaatacagtaagtcatcttttgtttttgttttgtggaaatattttcctctgtcgtgctctctgtaggtttattgtgggattgcaatttaaaatgacaaaattccttctggtatttcagtaaaattttagaacctttagaaatgtgtggctaaattaacattgattatagtctacatgttccaaaccgtactaatcccatgagacttgcagtggaaaaaaatggtttctgtggtcaaatccatctgaaatattctataatccaaatatcttctcctagagatcaataaggcacatgaactgaaatgtgaggagctgatatttactgacagtttaccatataccattatctcatttaatgttcattctgattctattgtgtgggcactatcattattcttactgacaaaaaaggaaacaggtttataatttgttcaaagtcacactcagaaaataaaggtactaaatctgactttagagattgcactcacaagcacaaagctatatgttccataatatcaatcagtgaaatagtatatattaatatgatttttatgttaattatatttctatattcatgttaacctgtttaaagctttgaggaataatgtggtaatagcatctgtttaactttgcttagcccaatatttctaaatctacttagctacagaaaactcattacttttagtggaactagtgtcctacagaatatagttccaaaaatgctgatataagtaagctataatattgctatagatgagaagccagaaagggagtagctctttagtgtttctctagccacttgttccagcgtatctgctggtgtcctctgcctatgcatgccccttgctgatctccacctgatgatttggaagggctagaaatagggaagcaaacacctgatatctttgctgctacaggtgcacagagcactggaactctctgcgtaaatgtgtaatatttagtacatcctgcaaaaggaacaagcttaatttagttaagccacaaggttgagtgataaacagcatgttgctgttattgtttagtcaattaaatcgtcccctgcacttgtaggaactgttccacatttattactagtgagaaacaagctcgggcagggttgttgatttccttgcattgggttgtgttatatttagcacatctaaagatttgagaatgaatgatggaagacacagtgataaattgtcgagcttttccaaagattcagaagttctaaagttcctgccagtgacagatggtctgtccttactcattgcttgtcttcctgacaggacttgatttttttttttccttttttgctcaattcccttatagtaagctcagcttcttgggaggtgggatagtttaatttgttataattacattgctatatttcaaagtggcatcaactctatatgaacatgtcatgctctttttagattattaatgtgcacatgtataatgacaaaagagaattataggataagaggaagagaggaaattcattaccaagggaaagccatacctcaatctttcctgttattttgataaccaagcatattattaaatagagtcctcattggatagtggttttttaaaatcaatattattttaataccttcaatattttataataatcgaaaactttttgaaatttttgtttaaacagcactagtgtttatgagcttgtaaaatatttctaagaattcacacaatgagcccaaacaactataataatgatgtgcctagatattaaataggttccaaatgaaaaaaggaaaattgcaatcaaatttcttaattcctttcattgatttcaaatacgttcactgctaaaataggagattagaagatatgctaaatagataaggaatgtgggaaaagaaaacaatttcctgtggcagtaaatataaaggctttaaaaattctagcttgtcttcaaataacttctaaaatccagaagtaatttagccctcaagttagtaatgccactagtgtgatagagcattatatagctgcaagtgttaccaagtggaaagagatcaacattatttaaaactataaaaacaatcaggtgaattgatttgggatttataatagttgtcttctgttatctacacaaagagctcagaaattctttttaggtaaattatttttttgtaagtgctcactccatattagctcaatttgataatacatgagaagcataaacaatattatcactgctttttctcctttatttcctttaattctacttctactggagttttaaccactttgaagtgatatgcatataagtgcatatatgtttcactgaatatatatatatcatactactatacattcttttttgtgtgtgtgtgtatgtgtgtgtataatacactactcatttaagtgagagaactcaaagcttactggatttccaaggtctaggctattgaattccattttatctttttattccccttactaaatgctcctaccattactgatatcagttacctttttattcagtggctttttaacattgctttattttggtaacatttgattacaaaatctcagagaactcatgccagcccactggttatgcatgaagatgttaacctagacctagggaaattataacccttgtttagtgaatattttctcagataataaatggaagaattaactttctgtgtagaacattacaaaaaatttcaagcttctttaacacatgatgtcacaataatacatggattttagttgtgtatattacatatacattgatatataattaaaaagacaagacatatctgtttttttattcttaaggaccattctagtataattcgtttttcttctccagataaaaatgtgtttgtaaaaaagattctaaatattcaatatttttgaaaaggccaagaaatattgcataattttgaaatcatgccattataaaatcacagaattaaaagttactctagtgagtatgtttattaaaatttattaagattagaaaaagtgcatagctgaagttaataaaaatgctttgcattaaagataagatgggctaaattagtctaacaagtagacccaaaatgtaatattctactactaaagatttgtttcatgtcagctcagcactacagcatagagtaggaaaggggagtctgctccatgcactggagctactgtggcttccaaggtctctaggcgtgacgtcacaatcctactaagctggaatggacagagagcagacacaagcacatgggaggttttatgagtcaggtttgaaagtggcgtacatcactcggctcacattctattggcttagaactcagtcacatggccttgtaataccctgcagtggaggatgggaaatgtagtctagctgagtgtcccagcagaaggagagaatggattttgatgatcatctagcagtttctaccacatgaacccttgactttgcttaaaaattgaggtgactttaaatgattatgctattaatatagtctagtttttctgataaactttgtatccactcacttgtttgtagggcagggtattttttaaattcatttagtaacctaaattggagactaagtttgaggactaatgattttagaatagttggtccaatagaactcgtaggagacctgttaacttgrggacccaaaagagattcagatagactctttcttaaaaatgcacattaagacatacaggactcatactgaaggttcacagatacttagtacttgcctatggtgaagagcactcaatttagaacatgaagatagatgatttatttatttatctgtagtaatgtgctaatgtttgcttgtaacaaatttatactgctaaaatatcttagatgttaatactcatgaataaaaccaaagaccagaaggagagactatctccttgctgaccctaagcaacagaggatagtacagtgagtagaatcatggctttagacaacatgtttgtctttcttcttcactgaaatacaggatttgtgcctcaatattatttcttgcttttgcctaacatactttaagatgaagagccatgggtaaatctcatggtctagataagttaccaacaagttatcatcataactcttaccttctacttagtccataaatgctgttgcacaaaacaacttctcatttagtaatttctacaggtgatgcagagtgcttatagtttaaattttgccttatctgattacatagcgaagattattatttagcttcaaatgaggataacttaagctaaatagaatcactgtactactattgcttcagaagtattttacatccatgctgcctatctattggtattcacttctttttctctgaattctatttacatattttagtagtggtttacccccttgtacaacatatttctctttattttacccagaaacccactttccttatatcttagtttctagtttgaagtctttttaatctaatggagtctcacgtattttctgttactttttattgttaataaatttttcattatttgtctcttagatgtttaaagtaaaacaatcagaagatttgaaataaggattaccattactggtataaagtgttttttttttatttttttttagctaaaactgaaaactgccataggttatgttttaawtattaagtttcacctataagtggagtatacatatatttcaaaaatgataataatagtccctggagtgtgatggtccccttcccgtgtccatgtgttctcattgtttaattcccacctatgagtaagaacatgtggtgtttggttttttgtccttgcgatagtttgctgagaatgatggtttccagtttcatccatgtccctacaaaggacatgaactcttcattttttatagctgcatagtattccatggtgtatatgtgccacatttgcttaatccagtctatcgttgttagacatttaggttggttccaagtctttgctattgtgaatagtgccgcgataaacatacgtgtgcatgtgtctttatagcagcatgatttataatcctttgggtatatacccagtaatgggatggctgggtcaaatggtatttctagttctagacccctaaggaatcgccacactgacttccacaatggttgaactagttkacagtccyaccaacagtgtaaaagtgttcctatttctccacatcctctccagcacctgttgtttcctgactttttaatgatcgccattctaactgctgtgagatggtatctcattgtggttttgatttgcatttctctgatggccagtgatgatgagcatttgttcacgtgttttttggctgcataaatgtcttattttgagaagtgtctgttcatatccttcgctcacttcacaccagcatggcatgtgtatacatatgtaacaaacctgcacattgtgcacatgtaacctaaaacttaaagtataataataataaaataaaattaaaaatgataataataataaagcttagaagtagataacatatcctcaattatctgatcatgtactatctctacacctcaataaagtcacagggaacaatgtgatgtataatggaatagtatgaaacttgtaccaagtgttaaaaaacaaagattctgcaactaattacgtactttgaaaaaacattgagtcacataccaaatatatttccaattttattttttgtgatgcaatgcacctcttagcaggtgtttctcggtagaacaaagaatagccaacaaaatgcaattcaccttctataacaactccttgatagttatttgaaagcatcttcatttgaaacccaatcgctgagtattattgctaaaaacaacagaatgacctcttacaaaagagtctcacttattatatgcccatgccatgcataaatcagaagaacgtgtcttagaatatgtatgataagatttattagcgtagaaaccttcatatagaaactgcccctactacacacacacacacacacacacacacacacacacacacacacgcatgcacacatctgaggcttacttctttggcctaagccaagaatcatttagaataaatgtatctgaagttagtcaaacaaagagtgctacccatatatttttattcttccttttaaatatattttatttcttttcatcttattagcaatctaaaagctactaaaatttcctacccatgctttaatgctagtatgttgcctatcacttttggtatttaactttcagataattttagaatagatcaccttagaatacacgttacaaacattttcaggagaatacagagcagtttacttagtcaaaacagtagaaagcatatacacagagaagtagcagcagataagaatattaagttagagccagattgtagaagctatgtactttgatatttattaggtagatgataaaaagacatcaaagtttatttcgagtagggaatgtgatttgaaattttaactccactctccactctcagttaaatcacaaaacagtgtattttatttatgtatttttttctgttgaaacccatggttttctaggttttgatgaattatgttttcaaatataattagcaagtctacagtgcatctatatgtatgtcaaatgcaaatgcatctacagtgttttgctaataatttttccatcttcaattgagtaacaaagacctttctaacatacgattcattttttgtcatttgcaaagtatattcatttagttgggtttgttttgcatgattaattttgactgatagctgatttgttttctattctaggttgtggagactaatttggttgcttttgactgtcactggatcattataaatgaggtaaagccaactaaaccttattgttaactctgtgtccttttttcacatatataattgtagcatttccaatggccttgaatttttaagcggaaacaaaacttgaagtaaacattcaacttactgagtgaatgctgtttaacaaagatagaatgaagagtttttaaaaatgataaagggttttatattaataaaataaatggagaaagtctttctcactgagtctcttttagctctttctgttggctcattctgcctgctcaaggagatcatctttataaaaagtacagttctactttgtaagcaaagtaaactcctcccagtggagtgcttgtgttccatttatattttaatgttgtttctagaactgttatgtccaccctccttacatgagtattaaaaagttcagcatatgaatatgaataaacacagaacagatttttcccttttcataaggaagtacaactgttttcaaatctttagacttgtcaaattcttgtgaaagtcttttgatttttgcaaagataatacataagattaaaaatatattacaacctaaaagccctgggaaataagttgttccattaggacctgccagtcagaaatggaaggaacaatgagcaggtcagtcatggacaaataatgtgatcacatacatttttcctcaacaagatgtagtacttggtcatacctattatttatgaataaaaataatgtaatatttacttattcattatactaaatacagaattctagaataataagatttcttttagggacaaaatagtatttttggataagaatcctggttttatagtcagcaagataggtttgatcctggctataaaacttggtagctgtcttaacatggatatcagcttcctgtgcctcagtttattcatttggacaagtataataacaattactttgcatgttcataataaaagttaaatgaggtattatcaggtgctcttaacacagtgcttgacaaatgacacacaagaatggtactgcgataatgatcatatcacgttaaaattcagagatcattcccttatatattatcttatggaatactaaaccatattctctgaagtactgagggaatgaggtccatagagaataaattattttcctctttttacacagaaaagtgaaaataattcccagtttcaagttgtttctcctacactacacttcaatgatggaatgatcctttttatttcagagtaaagacgctgaaaacaccttacaagtctgtttttggtctgccaaacattaggtttctatgaattttagctgtatttctcatgtcaaaataagataggtttttctgagatttcctcaggcaatacgtatctgsaggtctgcttttcaataaagttctggtaccttctaagtttctagtatgtcttaattttcatgtggaataactaaacgttgggatagagggaaagacaaaggaaaaggaacttaataaaccttcaaattaaatattttcatttcaatttttctccaaggaaactaagtttcaaagaaattaaacaattcagcaaatattacacaactattagtgatgataatggaatttaaaacttaatctttttcagtgtaaagctttggttggttttgttttgtttttgttttgtttttagcttttaagttcaggggtacgtgagcaagtttgtatgtaggtaaactcgtgtcatgggggtttaytgtacagattactttgtcacccaggcattaagcctagtgctcattagttatttttcctgttccttttcttcttcctactctcttcccttcagtagaccccgaagtgtgttgttcccctctttgtgtccatatgttttcatcatttagctcccatttataagtgagaacatgaggtatttggttttctgtttctgcgttagttcgctgaggaaaatggcttccagctccattcatatttctgcgaaggacatatcattccttttttgtgattgcacagtattccacaatgtatatgtgccacattttctttatccagtgtactgttggtgggtatttatgttgattccatgtcattcctattgtgaatagtgatgcaatggacataggcatgcatgtgtctttatgataaaacaatttatattcatttgggtatatacccagtaatgggattgctgggtgaaatggtagttctgcttttaggtctctgaggaaatcaccaaactcttttccacaatgrttgaacaaatttacactcccaccaccaacaatgtataaacattcctttttcttyacaaccatgccagcatctgttattttttgactttttaataatagccattatgactggtgtgagatggtatctcatagtggttttgatttggatttctctaatgatcagcgatgttgagctttctttcatatgattattgatcatatgatgtattattttgaaaagtgtctgttgatgtcctttgcccacttttaaatggggttgtttggttttgctttaaatttgcttaagtttcttgtagaacttaaggataaatagacctttgacagatgcatagtttgcaaaaattttctcccattctgtaggttgttcactctgatgatagtttcttttgctgtgcataagctcgttagtttaattcaattttgtttgtcgatttttgcttttgttgcaattgcttttgtcatctttgtcatgaaatatttgcccatttatatgtctaggttgttttccagggtttttatagttatgggttttacatttaaggttttaatccatcttgtgttaatttttgtatatggtataataaaatggtccagtttcaatcttctgcatatggcttgccagttatcccagcaatcatttattattaaaggaaagcgtcctttccccattgcttattgttgtcagctttctcaaagatcaggtagttgcaggtatgcagccttatatctgggcaatctgttctgctgcattcatctatgtgtctgtttttgtaccagtatcatgctgttttggttagtgtagcactgtagtatagtttgaagtcaggtagcatgatgtctccagctttgttcttttcccttaggattttgttttttgatacatgctttttgatacattttcacttagaattttgtttttgaccatgagaacaacatgatcacccactgtttaaggctcaatttgtactttgggagaaatagcctcttcatattatataggtgtaacctgaatagactagcatgtatttaattggtaataaataaatattttttgataattatctttatggtttatatttttgaaatttctactgcctcagttataatctgatgggagctatttatgtcactagcttttttgtattaattattttctagattactttttttgaaataaggattcttctaattttttgtttttatttcacatcctactttggacaggatatagactacacagatttcctgatgcaaaaccagcgagagtcattttacctattcatgtcaatcaaccttamtagaaaaataaagtgacttcttacctctttagagaaatggattaatctggacaaattaatgcttacaatcactaaattgaaatggccattctcctgtattggttgataagattgcagaaggaaccccttaattaattttttttaatatccaatttagcttccacaagtatacctgaacttaaaagtataaactgaaatagagcttctgagaacaacatggtcatttacccactgtttaagactcaatttgtactttggaagaaatggcatcttcatattgtataggtgtagcctgaatagactagcatgtatttcattggtaataaatagtatggaaaaaataataaaaatttatgttttattgtatttttcataagcattatgattcatgtttttaaacttattaaattttatttcataaaatattacaaatgaaaatattgtcattaagtggatgctccataatttgggccactattttgcaaaataaaacatccatataaacaaagcaatctcactggtaaataactcaatacatgttagaagtctaggagataattaaggagacctcaattattttcttatccttcaaacttaggttttctactgtgaattgtctaataaaacttcaccatcaccatcattgaaaccgttatctctttcttacccacagccctactttcttgtcttccagcagaggtataatttcttttgggcaagccacactgcctagcctcttaaaaatacaatgttcacaacccataccatttacattacacaggttagcacttttatctgaacaaggttaaaactcagataatgagcaaatgttttctgtattttaacccataaaaaaataaacaaaaaccattattggctggtatatccaaaatcaacactcttactttcaaattattccattcacccgcatacttattctcattcatccactttattctgaaatatgcctcagaaaatgacttttacatttttcttgcacacttttcatttacatgcttgtttatgggaatttataatggatgaattataattttccctagtttctataaaagaaaaaaaamacatggatttctcaatattgctaggaagctactaaactctaaatgtaataataaaaaaaaccctcaaaagatgcaaatgcccgttttggctgaacgtggagaacatgaatctgtctagttttgtttgtgtagctattattttgttgctaattttaaaatgggttgcagacattgatttaatcttattgcatcaatagtttttaaaggagggaatataaatcaaagttggcattgtgcatcatgatagaaattaatgtagaaacttgaaaacaatatatttttttcatttgcattaagtgtgctataataatgagaggctgtgctagctcatatggtgtaatcaatcatatgttagtacttggtaatagtatttatcttctccccgcaatcagtggatccagctcagagcagcctttccgtgcaagtattgtcatcccttcagggccctgaagcagatggcttaacactttatttaagttttacaaaagttagaaattcagataggaagacgtgcactgttcagagctgcaagaagcacaatgcttcatatacccttctattgcctgataatatcaaatatgacctttgttgtcttgattgactttactggctttttacttaatttgaatagtgtaagacattattctctgttaatcactgctgagtattacatttaatgagaaagttgttggtttggttttttgttgttttttttttcttttttgacagagttttactcttgtcacccagactggagtacaatggcgcgatcttggctcactgcaacctcttcctcctgggttcaagcgattgtcctgcctcagtctcccaagtagctgggattacagggatgtgccaccacgcctggctaatttttgtatttttagtagaaatggggtttcaccatgttggccaggctggtctcgaactcctgacctcaggtgatctgcccaactcagcctcccaaagtgttgggtttacaggcgtgagccaccgtgcctggccagtttrgggggttttgttgttgttttgagatttaaaaagcctatatgtgtaatggatgtttttaattttttctagtttaatgatgaattgaactgctcacttctaagctttcaagtagaaagttgccatcctgcttctcttcctgttggtacatagcctacagttggatttgttccattttttaacatttgcctaattgattcatattaatgttaaattttatggaagcatcaaagggtcatctttgctaaaatatgaaaaatacaaacaaataagaaacaaacaccacatagtagagggcttaatcttaatactaaaatcttctttatttagaattgtttaacattttaaagtattctggtgtctagaattaaaatttcaggtataagtctttagaagatgataaaatcttaccattcattcattaaataaattttgtatttatcaacatttattgaatacctactataagccaaaatatttgttagatgctaagaggtataagaatgggaaaaaggaaactattcctctgaaattgttatttttagtctaaattggcatctgatccartggattttgagagtcttttcttcccacaatcttattcatttcaacctaaagctgatatactacaaggattcagaaatgattcaattctcctaagagatttcttctgggaaatggctgtttctagatggagttgtatccccagaagatattttagcattccttttttcttcctcggggctttcacagttcaggattcaaccgacattaaattattaaagcaaagtgaataagaatattttgtcggacatattgactttgattcttagtagttttcaagtatctaggtaaattatttttgggaaaaaaggcttccttagcctaaataagtaaaatagaaaagttaagtcgctaaaaaatacttaatcatttgttattgcaatgttaattctacttttatgaatatactcaataaaataaagaatataagaaggaaaataattttataatttgggttctttaaattacttagagctcaggaatactctatatcttttaaaagattaagatatttaatggtgctgggggcttgggagagtgagtgctttattggtaaactagttcttcacatgattattttaaaaaatctgacagtttaaacattttttaaaaaattcagagcattaggataatatagatcctagtacattgtataacattttaatacacaagtttatttctggacttttttccatttaaatggatctctttatagattaaatgatcacttgtctttcagtgtttatataactttgcatctgccactctcgaaatgccccttttgaaatgcgcaagtaaagttccgtaaatataaaatagctgcctaatcaagttttcatatcactgttaaactgtttttgagatcacatgtcaagactaaaattgcaagtgaattttttgagacagattgtctgttagtttctttcagaatgacagattctttcttcccagaaaattactttctcttcccttccccaaataataataggcaaaatacactcaattcaaactgacatttcttcagatatattttagttgtttaggtgcctgagaacttcatctttggaaacctataaaaggtaaccaccccttttccctttttgtgggtttgaaaaatgtcctcttaaaggatttggctcatgatagatgactacatcattccttccagaatcatcaggaaattaaatgctgaaataatgtatctttacagttttaatttctaccattcataaatattaatctaaataattcctgtaaggaaatatgggcatgtataacttcttcagagactgtttcttttgatgacatttataaattcatcctatgagtagagtattatgaatgaagagcttcaagtcttcctgaatctttgtttataaactgagaataaatagcatctgattcagagtatcatctgttagcagaaaatgagataataaagtaattagtattttgcttaacatatagtagatacttattaaatgtgaatttttatccaatatgctgatttgtagttcattatgagtggtgtagatagagatgctgctgtttgataaaatgttgataaatcttagtattgctaaagcaaaaaaaaataccatatacataaaacaacttagttaatgttatgagaaaagtcatacaattttccactgccttcaaatgaaagttcctgtctgtatcatttggaatttaaaaaattggaagacattgaatagcaatattaatattaattaactttaaaagatgtctggttaaaatcaggacttcaaatggagttgacaggataccgtttaatcctactttgtgagtagattacatagaatttaaaagtgacctgctctttgacagacaaagtttttsgtggccagtgaaatgacacagactaaaggaaaaagacggcattttaaactgagaaaaaccatttttatggaacattaaggattgattaaatgcccagaaatccaggctattacactagagctagctgatgggaggcatcattttattttcagaaaaatctacacttcataaagatcatatataaaggacgatttttgaatctaacatatgctacaagaataatatgtaattaatctggtaagaaaaaaagaacatttacacctatgaattatctgttttctttcattttttttgtaataatttcttagatcaaacctcagaaatgctcactgcaacccaaaacttattttgtttcccatcttttatttctgttgccgtaaaaattgattgaaaccaatagtatgttaattacaaagacttcattcgttgtaaaggttccaaatgaacactattaagcaccaacttctctagtaaagactaccttaaaactaaaatttattttaatcacttttatcctaattccatttagaatagataaaatttgtttagataaaattaatttagataaagagcactgggtttctctctcatctcatcctgattcagattgtattaaacaacagaatttttcatctattccttaccaagagaaacatacgagttaacatcaacaattctaataaattattagaaaaacttcttatatatcctcttgctctacttgcctcagttaaaagccaaatttttcattgctaattatgtgtgtgtgtgcatgtgtgtgtgtgtatgtgtgcgtatgtatgcatgcgtatgtgcgtgtgtataactcttacatggcaattaccttcctagatactcaaagtaatagtattaattaataataaactataatagcaacttactttgtgacctttttaaatgttttgaccacacctatgtttctacaatgttcaacattataaattataaacttattgttaataaccatatgtaagacaattgctccatttagcattgtttaggcactaatgtatataatttaaagcatagaaagcaactacaaatgagttgataattttaacaaaaatatgttgctttcatttagatatgcactaagcattaaaaccaatatattacagtaacagaatccctaacatttacagataacaactcataataggtttgtgttttgtgactgtattaaagtatctctaattcttccacctcttatcttataggaaataaacgatgtggacgtacaggaacttgtaagaaggtcaattggaaggttaacgattattcggcagacatttccagttccccagaacataagtcagcggtgtttccgtggcaaccatcgaatatcttcaacattgtgtgatccaaaggatccatttgctcagaatatggaggtatattataaatgacaggatatttcttccagggtgctttgttgggcaattgcaaggagagctttatgagttgcattggattcagaattatacgtgttatttctgaacaattctcctccagcaatttcataagtctaatggggagaaagtgctaagaatttgcgtctttgttctttttgatctcattatagraaaatttctacttgcttaataaaaaaatataataagtaaaggttattttcttctaaacaagtaggtccataacatttcccacaggagaatttgtaattggtactcctttttccaaactctaaattattaaactaataaatgtgcttgacttttctggcctaagaaggacatagatatttattctttttaaaaagattggtctccagtttgaataactccaacaaaaaaaattagatatgaaaaaagtgctgtagaattgtatggtcatatccaactccgagaggatatagctgaaaccttcagcatccagaatacaacaaagaatttgaaagatataaataaaacctctgaacagcgaaacagagaacaccaagtccctgtagcttactcataagaatgccctttaaatacttacttgaagcctatttctttttcttaagaaaaagcctctgtggtttttttttcactttgctctggagatctcaatatgtcaatctgaagggggtgttacacaaagcaggcacacaggacaacagcagggagccttaaggagccctcttaagcaagagacgggaaaaaaatcaatcagataaactaactcatataacctgtcagtataggactcttcctgcaaaaacaaatctgtgccataaaacaactcctaaaggtatcactgcagtataatgctagcatataagttaatatttaaacaataaccctgagatattagcaaatattaaagtcatggccaatcttagaagtaagcaaaacctaatatattttagaaacttgttctttaaaatatttaccataggaaacattttagtacttagagattttcagttttaacagtttggaaatataaccctaggaaaactagttcctctctaataatactagataaataaggtgcttttgcaaaactaatctgaaaaataaccccacaacctccctatccttagtcacctttgaatttttaaaaaaggatttgccatttatccaaccatttcttctaattactatcactgtagtacgtggactggctccaggatcattaccctgtaactttctgttgcctactagattttaagctcctttagaataggtcctttccatggccaggtgcagtggctacacctacaatcccagcaatctgggaggtcaagggggagaatcacttgaacccagaagtttgagaccagcctgggcagcatggcaaaaccccatctctgaaaaaaataataataataattagccaggtgtggtggtatcctcctgtagtcccagctactcaggaggctgaggtgggagaatcacctgagccctagaggtcgaggctgcagtgagccaagattgtgctactgcactccagcctccagcctgggtttcaaagtgagtccctatttcaaaataaatagatatgtcccttcaagaacccagcatcataagtactcataacgtgcttctctaccatttcctccatcataattaccacagtgctttggatctgtgtgaatatatatgtttgaatgtaattaaggagaaggcaatagtcaaagtaaatcttctgaagccttaacaacatctctttaaatttcagttccacccttatctatatgtgtattagttcattctcacactgccataaagtacagggaagaggtttaatttactcacagttcctcagggcagggaagcctcaggaaacttacattcatggtgaaaggggaagcaaacatgtccttcctcacatcgcagcaggtaagacaagtgctgagcaaaaggtggaaaagccgcttataaaaccatcagatcttgtgaaaactcactactatcatgagaatagcaaacggataatcatccccatcatttgatgacctcccaccaggtccctcttatgatacatgggaattatgggaactacaattcaagatgagatttggattgggacacagccaaaccatatcaatatgcttataatgtcccatgtttgcattttaactggtcatggatataattgatgtgaaaatgatagaattctaaatagaaaaaaaggaaagaattttgatttagaaaattataaaatattaaaagttgtgtttgttaaaagaagtatcaggaaatgaaatacaaacttaagaaaaattattgactgtgtcatttagggacagcagaaattattttacagcatatttgcctaacaacataatctttccatttcagttgatgaggacttcaatatctgtgaacaaatattttatttatgtctatattcctaatcttacctgaaacaataaagtatggggaagcaccaacttcctcctgactcataccttcatcttggtcctgtcaaacccacagatggaagaaaacaagaaaactacttttgcgttgaggatttgttacatgtgaacatccctcttatgtatgatagaatttgatctctagactgttacctattttaatatacatagacagagaagtaaaatttagaaaaaacagaaaatgcatttcacaaattttttaattagtgtccaaagactgaaacccaggattagcttaagttgcaaaataaatattaaagaacaccttttagctagaaaatggtgtttttgcaacatatgtaacaagcaggaagtgatccatttactgcttagtggaactaatgttagtttggctgctaatggagagaaaacagaaacattctaatacttttgctcctttctccatctaagaaaaattgtcttcaaattgggaaggttagagtaaaattcattaaaagaaaatattccactggttcagaaggagcagggagatagcaagagtaggggcactgctttgaattaggcttgccaaataattgctcagagtagccaatcagccagcaggaacgatcaaaatatgatagctcagaaatactggagaaacacttaggaagaggaccaaggtacaagagattggtgtattgtcccaattactgaaaggaaggaaaaaagattctcatggagtttagcatattaaatgttactatgtagataaactgtagaatatattattaaatcaatggtttggagtacctcagataagacaacagggcttccttaaaaacaaacactgccaaactaagcctttatttatatatatatatatttttttagattgggagaatgtcataaatctatgtgttacatgttgatttttatgtggtgtttgacaaatttttacctgaaatccttaggaaagatattgaaaagtcttgacagagtgatgacactgaaacattttcaccaaagggttcctaaaggcagaagatagtgaacactctggcctcagacagaaagcaaaataaagctcaaaaatatttaagtctcattattacctttaaaagttataacatttgtgtatatacaattaaaagtaatacttcaaattatttgccaattaaactagttgtttttctccaaatattcaaacaaaattgatatctaaataaatcaatcaaatcttcaagcaatattgatatgactagaatatgccttagatgtattcggtggctttgagtacttcctgatatccacaacctaccaccagggtttcttttgtccagagtttgaggattgtagaaccagatgaatattcaaactgcagtgataaacattctattcctgaaatgcaaggaactgtctatggtcattcacaagattctattcttggacctaatatttttaaaacgtctatcactacgtgaatgaagatgaataaaacatgcctatcaaatttgtaaatggcataaagctagaagagaaagcttatgttgtattagataatcaagttccaaattgttagtgttgactgaataataagcctaaatttgaaaaagcacagataaagtataggttcaaaatcaattacatgaagaatcctggtttgacagctgttcagatcccttaagttgaaggtaaattcagtgtgtgtatcacacaaatcatatttgctgtaactattttaatataatcgtggtctctatgtcagaagaattttgctaagataaagagatctaatgtcttacactattctctcctagtcagatcacatctgtaataatgtgtcaattctggatactaaatttttaacagaaacattgaaacacaagagaaagacagagaaagagaactaagatgatcagcctagaaacgataccaggtgatgaaaactaaaagaaagatatctcaaagcaagccacaratggtgtcaaatattgaaagcttgtcatgtagaggaggtgagtgtggagatttggtgatgtcaaagaataagtgtagtgccagtaaggtagggagaaatgattggtcatatgtgacatactggagtctatgattttagaggtgatgtatgtttctgtccagtaaatggtcatttgtgttggttgaggcctaagtagaagtgaagatcatctgtacagaaattgaagtgaccttttaaaatgatgagagatagtttggtattattgtgaaggaggagtcaaaggccttacaaataaaataaaattaccaaaagatcagttaatgatgacagaaaaaagcaataaagtgtagcataggaaagagtgtgaagctcaaagaatgggcacttgcctgcaaaagaaaaagtgtcagattaggaggggtaatgaaaagctcagggaatattaccaccacttcttgatcctgcagtttggaatgtggacaaatgaggagacgtagtcatttattgaaaatgcctgtcatgtaacaggtacgaagcactcacctttaagactagcatagatgctcaaaatacatgcctcacggtctgcaaaagagaatgtgccccagcagtgtcaggtttggatagaacccaggttaccagatttttcgtgtctcaacgtctgccaaacacacctagctttaaaattgactttctttttttctcctctctccatccttcgtcttcttttacttcacaactgtttatcaaaacccaaatatgtgcgaggctctaggctaagtcttagagaaataaattacggggaaaaatggaagagaaaagatgtacagtatgagtccccatccaggaggaatttatttttttgtggaaaaggtagatttaaaaaagaatttagtattctgatatgtttcaaagacgtatgcactgtgtgttccggtagatgaaaagaggtgctcaaccttgtgtaggataaggaaagaaaatcagaagttggcagggtaggattctcctagcatgtaagctttgaaccaaatattgagaaatgttaactagttggagaaaggtaaggagatagcgagggatgctaccccaacaatcttttttttaaatatatatatatatatatttttattatactttcagttctagggtacatgtgcacaatgtgcaggtttgttacatacgtaaacatgtgccatgttggtgtgctgcacccattaacttgtcatttacattaggtatatcttctaatgctatccctcacccctcccccaaccccacaacaggccccggtgtgtgatgttccccatcctgtgtccaggtgttctcattgttcaattcccacctatgagtgagaacatgcggtgtttggttttttgtccttgtgatagtttgctgagaatgatggtttccagcttcatccatgtccctaaaaaggacatgaactcatcattttttatggctacataatattccatggtgtatatgtgccacattttctaaagacacatgcacacgtatgtttattgcggcactactcacaatagcaaagacttggaaccaacccaaatgtccatcaatgataccccaacaatcttaaatacacgttcaccaaagggaagagtaaaataaagctagaaaagtaaaaggaagcaagtttcaggcagtagaaccaggaggggttaggaaaggccagaaggttgtgtattattttgatttccctggrcatgtatccttcatgtaacttctatattttcctgttgggtctttactgcctaattccaacctgaatgttgattcatggactagttttagctgtatagcagacttcagccattcttttgtagtctatctagtaattatcaggcaaaatggggagtggctgggatagggagtgaaaatagccagtcctaatacttccttatgaaggacaaacttgtattgcacgtaatgcattgagtgttcaatgtctcttcaaaaaaggcctacaagtattatacatataaaatgatatttaacaaacacaaaggattgaagatttacatggtatgtaaaagaaaactcacaaggcactgttaggaagttcttattaaaagctgtgcattgcatcagactctaattatctcaatagccaaagcttagtaccatcctgtgatgtgggtagactattttaaaaatttcctccatgattaattataacccgaggacaatccatatagtctcctgtatgtttttaggaaaaaccgtgataacaatatactttcaaaaatctgaaaaacacaaatgctttaagatggaattaattttcatcactacattgattcctcattttttttattttatatagagtttttccttcagaggaaatataacatgaagcagcttttattgacctaggattccttttggtattatgttttccaaaaaatttttaacttctttgaaaaataagcacctttggtgattaattgacagtataaatagtagttctggtgaaacttaattgtaagaatacagtaaaaccttagcaaaaaattggctataatttatttttcaatctatgtagaaagaagttaataacatggttgtttcagaagaagaaagtattaatgtaaacacacattcacaaacagttaatagtttatggtatttgtgaaatcaatgaattgtaatgcatgtgtatacctgtataattttgtatagatccttgatcactataatacatataaaagattgtgttctttcattatttcatttaagaatctccatatacacaaaaatacacacagtagactacttcttttttaggtacctatgacattcatatatgaaatcaagttgatatttttccatctgaataactagaatgcaaaaacttaacatattcagaaaatgtattattcagtttgcccttccaatcttaaacccttagattcttacctcctcagagagaaataagggccaatgattttctaaggtctaacactaacagccttatctctgtcgaaatttctttctttccttttttaatcttctctttcacacctaaataagctgaaaaagcaattgaggcatacaatcagacaagacttcattctcaatgacaaaattgcccaggaaatgacaaaagaaaccttctgcttaataacccagtaaaccagccatgtatgacatgaacagaagcagttgagacaattattttttttccttattcctgatgactggtgtcaatgattctaatgatcactttctaatgtcttttcagatttccaacctttacatatatgacacggtgcttctgcttgctaatgcttttcataagaagctggaggaccgaaagtggcacagcatggcaagtctgtcatgtatcagaaagaactcaaagccctggcagggtgggcgctccatgttggagaccatcaagaaggtaacttcttaattttcatgtaaaaaggatatggtaaataattatttgacatattttagaaaaagggtttcctctttaatatttctacaaattctaagcacaaaacagtgtaatggggaaattaaatattgaaaaagaaaaaaggtgagagagtcatcaacatataraaaggggaggcttccttatttatttataagggagttttaagcaagtaaaaaaaattgtggttgagatatacccacttgactatgtcattagcattagagatactgaaattgttttggtgcctgtcgcaaaatacaaaargcttttaaaaaaacacacgccatccactaaaaaaattaacagtagacttaattagcactttttcagttagataatatacatggtaagacactggatgtgatggcctttaatttatctcatgataaggataggattcataagtagataatatgttgcagcatttgtgaactatttggggtaactgattgcattattcctcttcactgtccatgtgttgcttattccagctgtgaatctgtttggcttagctacctgttccattcccagaaggcagtttatgttgtttagctcctctcagtggtataagcattctgcagtttattagactctttgtcatgtcatccttcttgacattttccatttgtcttgtaccgcctcttggatttaaaatgaaatgattaataaaacaaacaaattctcctataccctttacacaaaggagacagacatttggaagtttatattctgtattttacccatcctttttctttctgcatgtattttcctttctttcctgaaacccaaagaaaaatagctagtcaattgaaatataaatgcccttaaaaagtcagagtaaaatataaaaatttaatattagaagtgaactaggtgtacaaaaactagaagtagaggaaataaatattttaaatagagaatagcctggatctttctcttggtacttgtatcagtcccttttctgctgttctaactgattaccacaaattggraaatatataaaaaatggaagttttttggcttatgattctcaaggctgggaagtccaasaccatggcacccacatctggagagggtcatctcatggcagaagagcatcacatgctgagcagctgcacaagatagagcgaaaaagggggccaagacttcctggataactaatccactcccattatatgggcattaatctatttacgaggtggcatcctcatgatctaatcacctcaatgtccctatccttaataccattgcaatagcaattaagtttcaatgtgagtttaggaggggacactaaaatcatagtattccatcctttgacccccaatattcacgtcccgctcacatataaaatatattcattctatccctatagttccaaaagttttaacttgtttcagcattaactcaaaagtccacatttcagagtcttatttaaatcagatatggaagagactcacatgattcatcatgacgcaaatttctgccagctgtgaaactatgaattcaaaactgattatctacttccaaaatgcaatggtgggacagtcataggatagacatttctattccaaaacagagaaataggcaagaaaagaacaataactggtcctaagtaagtctaaaacccaacacgaaaaataatattaagtcataaagccgagaaacaatatccttttacaccatgtcctcatttctggatacgctgagacagggattgggcccgcaaggcctcaggcaaccctgctcccagggctttgctggacccagcttctgcagctttcacaggttagagtcacatgctgttttagtcctacagttctgtggtcttagggatggtcccacttccatagctccagtagtcattgccctagtggaaactctttgtggcaagtccaaacccacatttttactcaacattgtcttagtacgggctctctgtggtggtttgaccctggagacaagtctctgcctgagtcttcatgctctttgtgacatccttggaaactttagtggaggaatccatagccagagttcttacactgtatgcctgaaggtgtaacaccatattgatgataccacagcttactacttgcactctgcagaatgacagcccaagctttacctgggtccacttgagccacaactagggcaggtgaagaatgttacactggaataaggggagaagagttgctaggtggccctggacagggagcccatgatgagtgccttgggcatatcccctgaaatcattttgccttccgagagactgtgagggcagcagcagcttcaaagacttttgaaattccttttaaatctttctcctattgtcctgataaatagcacatcgctcctttgtagccatgttaatatctttagcaaatagtacttgactgcacccttgatattctctcctgaatattatatatatataattttttttgacagtctcgcacaggctggagtgcagtggtgcaatctcagctcactacagcctctgcctcccgggttcaagtgattctccagccccagcctcctgagtagctgggactacagccacatgccaccacacctggctaattttttgtatttttagtagagacggggtttcatcatgttggccaggccgttcttgatctcctgacctcatgatctgcctgcctcagcctcccaaagtgctaggattacaggtgtgagccaccatgcctgtccctgaacataggttttcactctttacatagccaccctgtaagtttttcagattttttgtctgcttctgtctttaatataaaatctatctttaagtcgtttatttttctcacatcttattatgttatgtacaggtaaaagtagccaggcagaagcctgaatgctctgctgtttagaaatttcttcaaccagatattctagttcattgcccctaagttctgaattctacaaagtcctagaatatggccacaattcagccagggtgtttgttactttacagcaaggatggctttcaatccagtttccaataccctattactcatttctgtctgagacctcaccagaatgtccttttctctccgtatttttatgagtattctggtcacaacaaattaaataaactcttaagaagattcagactttctctacagctctcctcttccaagtcctcactagaattgttcttaaagctctattcacagcagtacagtttttttgctagtctgatccttcaaattcttcaagcctctacctttatgcagttccaaagtcacttccacatattcaggtatttattataacaacagctccacttattggtaccagttttctctcttgatttgtcttctgctgctagaataccatggacttcgtagtttattaagaacagaaatttatttggcacacagttctggaactgggaaatccaagggcttggagctggcatctgataagggttatcctaggtgaaaggacaccacatggcaagcaagcgcatgagacagagacaaaaaggggaccaaactcttgtgacaattaacccattatagttattaatgcaataacagcattaatccgttcatgaaggcaaaactctcatgatctatttatctcttaaagtttctacttctcaataccattacaatggcaattgcatttcaagatgagttttggtggggatttcaaaccatagtaatgctgtgtcttctttgccaaggataattttaatgagaattttggctgttatcaacaaaagtacttgagaattaaatgtattgaatatattggcagagaaagacttttcaactgaaaaatgaataagtctaatctagcctcaaggtgttgccaaaatcttccagccttatctatgtagagagctggcaggtataaatccaagggaggttgttgaacatgattctaatcctgccaatttattaattcatggtttggctaggatgcaggatcctgaatatatttcttcttctgaagctttcataccaagacaaaataatagtttaggaggttgcttagaaaacactttagtgagaggatcaggaggaaggaaagagagacaccataatatgtcagtatttttcatgtagaaattcaatatgtaagatattgctgttagaaaatttataaccraaacaattatttaatacaataattatgaaattttattttgtgggactatgtgtacatttgtccctgtcagcttctgccccagtgtcacattttaaagaaatatatccattctttgtgtcaagaaactcagtttgaataatgtacatgattacaaatgttcaattttatatttttgtctcacatttcaaactgactttaaaaatggatttttaraaaaaaaaattggattactttttgcatcatatkagtgtttttggtcacctatttagatgtcaatgctggtgatactccacacattaagtgagaaagaaagttcattactcacatagagactcccaagaagagcagaatggccccagacagattcaggctggtttggacaaaacagagggagtggcctgggcctttttgttgactaggggttagggctggcaaaaggttcccactcatgcgggctggagatttgagaagctcaagtttcctacaggtgtcaaataagtagatgtaggatggcctttcttaatcagactgtacagatgtggggccaaagaaagggagggtaaggcttaaaaagaagtcagcagccagcaacacaaatgaggtcaggctctttattatgatgggaatattctagtgttgaaatttttaattacattcaaataaatacaaaatgcctatattaagggcacgctacatacacattaaaaatccgtgtgctgctgcacaaagtacaagcaagaagagaacaagtttctctccctaaattaatttctattcttattatggggaatgaaacaaaagaattaaaaataatgtcattgacatagtagtataaatgtctagtaatgggcaaggtttctgtttctcaggtactcttgtgtacctgagctttataatatatgaatcggtagaataagtgcctcctcattttcattctttttttaaaaattagcagttaatgcttgcctgtttattcctgccaaatattatcagcagccctgtgccattgttatttacgtggatgttgtatgatatttttgaaggaattatagttttaaaaatattgagtctttccatctataacatggcatctatccatatagttagctttttgtaatcctgattaaagatttatagtgttcttcacacatattttcattctatttatttctaaactttaataggatgtgtgtgtatgcgtgtgtgtgtgtgtgtgtgtgcatgctatcataaatgagatatgttccattagattttcaaactggttattgtaggtattaaaggaagatattgatgtttcatatattttttgactgacctgatcaactttccaaacttaattactggttctcttgtatttttcaaatatacattgatatcactgtcaaataaaattaatcactccaattctaatactttacgtattggcatagacttaaaaagcagcatgcaacaagtatactcttaaacataccaggagcattatctgaaaagaggatttttaaaaattttgtaaagaaagtattcttctatttttgttttattatattatgtaattaagttgtttttattagtaacttgtacagttatagagtagcaagtcacaataaagttaatctaacctttttattctatttttaggtgtacagaaccgaaattcagaaaaattaaatgatgtactaagtgttgcgtagctaattagttttaaataccaggttttttggtttctaatttggtgtctgtgtactttaccatttaccatttttcttgttcatggcaatcatttttattcactcctgtcaaagtcacttggctaaacatgcacaccaagaaatcatgggaataaacaccctcaattaatattatataaaccctatttaagttttaatatggcttgtttttcagtctttagtttattatgacaagttacattgttgtagcttctcatgaaaactatatttatatattgggaaagagttttcatgtagtataatttaatttgttagtgttatgtaacctagagcaagctttcaaactttttaactatataaatataatcaataaatttgagctgttctggaaaaaagtaggagaggatttccagagacacccaccacaatcagctcttagagctacaatttgaaaaccactcccctggggtatttataaatcaatttgcccagtgcagatctaccttcttggaatagtgccatgtcattgcaacacgagtagcctgtttttatttacagaagtgtactatatttaaatagaaatcatttttcatttttttcttagtgttaatatttttaatactgaaacaattttcaacagggcacttcattcatgtattaatcactcttttaacaggtatttatcaaatttctatattgtagaatgtactgtgcaaactcatttatggaattaccccgcaccccctgccaaaaaaaaaaaaaaaaaagaaatttagaggccagtagtgaatattgactaactatacaaagagctacactctaaggccagaaacaacaaaaagacccaaatgtggtaaatataggatactgtagaatcttagagaagagtgtaatgtgctgtggtacatactgagatacttgcttcacagccaagaaagacatctgagcctctgttcaggaattgccatggacgggaattgttccaccctctttctaggggcagcatgaatccaatgaacagtcattgcaaaactagaaatgtctaagttcatttcttcaggggacaaatatgaagggttatctacagactagtacgttggatgatctaaactggtattgtatttgcatcaaactttcatctcttcctctgtccagtccctcttccctcactccattgcaagtgctctctcagtagcacttcaaataaaccttctgcatacaagcaaatctccatctcatacctgtttccttgagaacccaacttagaaaatagattagaaatatttgcatggaactgatagcatcttaatggaaatttcaaaactagcaggcttaggatatataaagctatggaaggaggatatttcaggtggtagaatgctgtagctgatatatctattagactaaatcatttgtacaatgacaagagttgattaccagagtgcagagaacacataaaattgttttgactggaaagtgatttaggaaaaaaattattttgtgggtaaatgtaagacactaaataatttttggataaaatcagacctgaattttagaacacctttacctcttttatttaattttttaaaagctaagaaaaatcttagattcaaaattatgtgattgcacataaaatcactggacattttctatgtattctatattagtaagtgaactaaaatgtaatagatgtttaaatcaaattcttttgcattgtcttaattgaccaatttctgttaaaatttttgtaattatttttaatatggaatgtgggaaaatagaaaatatcagtttatgcaatatgtcaaatatttaagtaccagtacattttcttatattgatatatgttgagcccaacatatatcaatatgatatctgatagagttatcttgatatatgtattctatattagtaagtgaactaaattgtaatagatctttaaatcaaattcttttgcattgtcttaattgaccaatttctgttaaaatttatgtaattatttttaatatggaatgtgggaaaatagaaaatatcagtttatgcaatatgtcaaatatttaagtaccagtacattttcttatattgatatatgttgagcccaacatatatcaatatgatatctcatagagttatcttgatatatgttgatatctcaaaaagtattttttgaaatgataaaaatattgaaattataccatttcttacatggtaatttattcattcaacaaatatttattgaatactaccatatgttgtaccataagatcagagaataaggaaggaaaatagaaatatcaaaaataattacaagcatgatttgttctacaaaaggagaaataccaagtgttctagaaatatgtcattggagggcctacttaggcctgagagtgatagataagtggaaacgtttaggctaagtatgcattagccaagaaaggaaaatgaagagtattccaggaaaggggaaggaagaatgcctcatgcaaatgaaatagaatgtttctaggcttgtaggaaagagagcttaacacattgaagcacctgaaataagcccaaggcagccagaatagagacatggcttctaattagctaaaagggggaaagaccatcaagggtttgataaacgatgttgaaatttccaaattttattcaaggaataacgtgacactgaaggattattattattattattatttttttwttttttattttttattttttgagatggagtctcgctgtgtcattcaggctggggtacagtggtgtgatctcagctcactgcaacctctgcctcctgggttcaagtgattcttctgcttcagcctcctgagtagctgggattacaggcgcgcaccaccacacctggctaatttttgtatttttagtagagacagggtttcaccatgttgggcagagtggtctcgaactcctgacctcaggtgayccatctgtcttggccttccaaagtgctggaattacaggtgtgagccaccacacccagccgacactgaggtattttaaacagggtggtgataaaatcagattatcccatgcttgccaagtagagaattctgcaactgccattgaaccagactgactgcatgacagaacaccaattaagaggctaatcttcttacttagagaggacctggttaggttgtgggccatgggatggatagaagtagatatccttgaggatatttacaggattgaaataagatttggtgatttaataagtgtgtgaggaagacaaagattaaaataatgattcctaggttaatggttgggacaaaatgaactctaataagttgtcatgtttggttttgtggccttttaaaacgtctgcatacttagagaaatggagacattactttttgtttaaagcactatgtatcatttagaatttacaaatctgaaggaaagagagagaatttaggaaaacataatctggcttaccacaaacagtattgtcttgaaatataaggtagcctttttacaaaaatgtgtgcaaataaactttttgtcatggggatttaaaaactgtcatccatgctctcggtataggcctcttgtcaattcaccaagatacactccagcttcaggtcattttgatcataaagtaggtaaactggaatagatttaatttaattcagttcaacatgcccttctgagcaattctctatatataatatgttatattgaacacacagtttacatagtccaaaggaaaaaatacgagacacaagatgaaggtttcagtttgggctcctcagttaaccggttgacttagggcctaagggtcccctaagatggagacagcatgatcacaatgcttgtaacttcctgtttacttctcagctggctgtgagtctctattatgaatgactatttgagtgtatatgtatatatgcaaatatatgtatatatacacacacgtaatgttacatggcaactcaaattttcctagatatttcacacaaactagattctttgtatttgtcgtcctctttttttttttttttgcatcttgtatcttagtttctatttacccataaaaatatttgtttgttgggtagaaaatgtggtatttttctggttaggggtttttctctctgaacctgatgctgatgaaacatgaaggcatcagggctccctgctgagtctggcacctcccagagtattcactgccttgctgggcccatgcttatattaacagattatccttggttaccacacacatctgcaggttacaaggaacctagaaatatgtataaggaaattagacgagtatgataaatatttgatgtcccacgtgatcctccaaaagtatctcttaagttcctttgccatttcaagcgtaggaaaagatccttcatcataaacagaatgacataaagtctcagtaattttttttttactttttccccaacttttcctagccataggtgaataatacattttgccttttagaaactcattatccagtggtaaattattctcaacctctgattctcttcttttaatttttctactctttgctctctatatttgatgtccactggtatttctatatcaagtggatggatgaaattaaaacaaattttatttcatattttttaaaaaggtttactctggcagcaatttttactgccaatttaaaggacgtttagaaattatctgtatgtgttattcatactaccaatgtcccattagcttatattgttgaaaatctgctgcatcaccaagagataaaaaataccaccatgcatgcacaaaaataatgaccattcattaccccttggctagcacacattttcaccaaggctctgttttcaaggttaatttgaggatagatggaaaaaagctttaaagcgctggaattttctaaggcaatccaaaatcagagaggttaagtctgggtgatataacaataggttttagttaaagggtttatttgctcgaaatactgacctctgaatcatccctgacatcttcatgagggaaggtttcactgattttacatgccaacgrctcattaggaatatagcataaggaagataaatyacaaagtcataaagttgagcaaggtaagtaaatgctgcagcaaactaaatgcaagtcccccaatttattgttttctgtaccttcttcaagtaaactaagtcattcagtggaagataaagtaaaggataaaggcatgacctggagtggtcatgtgggtattgattgaaaataataacacaacaccagattagtctagtgctcaaatgtgtaaacattttagggatatagtagttttatgtagcaattatattgatatatgatatctttttcgtataaataagctactaaaacataaatttaagattctgatawaattagaagatattaatcaggtagatgtgtgattatgaacaagaaaaacttgtataaaaatattctgaacacaagtttttgaacttacttgtagtaatataagctatatttgtcaatcaaattcctacagtatttgtcatttggagatactaatgataataagatgcactgcacttacttcagtctttaaaatataattggatgttttgagatattaacagtgagcacataccggaatagattggcaagaatcaggtatattgcccttatcaaaaatacaagcaatcaaagggaacaaaggagaaaaaggaggagacattctgcatggctccccaggttctttcttcccacactggaaatgctgattcggtctccaaggaaggtttcataggtttatttctcaccacagggaggatttacattatgaaacatttccatttttacccgagaaaatgtaaagcttcaggacattttctgaggagccacaaaccattaatccatagatcctgggtttatttactacagtattttttagcctgggatatcctgctaagggctttgtatagataaggaatcttccacctagtaaatattaccagtctgtttacctggagttccaattggcagggaaattagaccaaccttcaccctcagttgctgccctatacacacaccagtgaaaggagtgaatacatcctagaccagctgcttaacttttttctcttcaagtactaatcaatgaaatgtaactgagttgacatttgcaaaaatattttccaaagccatctaaatatttaagcgtataataatttttggcaaacccactgaattttaattaacaaaacaagattatgccaacgatttctaagagaactaaaaatccttcaaaaataaagaattaagtaacagtggaagtaatgatgataatagtawttaagctcttaccacatgtcaagaacttttcaatattctgtacatgtattataagaatcagaataatcttctggggtaggcactattattttcccatttaacagatctagtgtttgaggcataaatgaaatggcttagcctggtttacacatctagtagatcccgaagccattggtgaaacccaggaagtgtgacctatgttcttgactgctaaatcatgcatgaaaatccactaggatttttattaataaaactagataatagaaactggctgattagggaataatagtaaagaattaattttgttgattattactattataaaaatacaatagattaaatattaaaattagtgattcaggtaggaaaacatcaatcaaaaatagtttattgaactcatcatgaactttgcatcaggtgattgggctacaaggcacaaatgaagtagaaggaaaagcaaatagcataatattactaccagccagaaaagactggaaacggagttgcaggttatgtcaagtgagatatatttaaatatcaacatcttagaggtgataattaaaacaatttacaaaactgagatcatttgttttctaaataaatgtcattaccaggccaaaattttaagttagacatattttagcattgaagtgactcagagtgcgattttcatttgtaaaatcctaaataatatgaagactgataaactaaactgagaaaagaatgataaacaagaaagagagaagtatgacctacattgccatctgttggataaatgaacatctgtcatattgaatgaaagatgaagcttggaattcccagagaatctcaacagccagcactacccgttaagagcaaaaacagatttcaagcctaatttaactttcttttatttttgatttggaaaatatatttaaagaaggggcaaaaaaatcaccctctaataatctagaaaccatggattttaagatccccaggtataattttagaccaaattgaatggaattgtgctagaacaaagaagattgttgaaatctatcttatatagattttatgcactccagaagcatcttgttttcaagatggatccattcaagtcacaaggtatggtggcaaaaacttgagcctggaacttagtctgagctctaacatggtttcattttgagcagtcacttgacttttggggtctaaatttctgtttttatgaaaaatggatgagattggattaaggaatttccaaagttaggttcaactgtactcctgtttatgctgtgtacctattttaaaaagtagtctgttaaaaattgcttactttaaatattattttatagatagaagtagagttcctagaagttccttttatgtttatttatttatttttttacttctcaaattttacatcagtatctgttctctcctttagggtggagttagtgggttgactggagagctagaatttggagaaaatggaggcaatcccaatgtccactytgaaatccttggaaccaactatggagaagagcttggcagaggtgttcgaaaagtaagacaagacacacygattaatacgctttttcctatactatggttttgcttgattgttttccatgcagtatgatcacagtacccattaaagtcaatattgtagtgtgaaagagaaagcagggggtgaggggaaattaggcattgaaatgactttaaatatttaccagaagtattaagcaagaaattctatttccgacttagaataatgtaaaggaaaaaagtaatctgaatcttacctagggaaatagcatcatctttcatttgttacaataatagtttttataaaatagtaaatttaatatttatacactttgtagctgcttggtttttaacttgtaacatgtacaaaatcagaataagagcttggataaatttcatatagtaagacagaaagtctactgcaagatgtgacattacagtattttaccttctgtatgtgtcatgtaatatgtagaaaatagtttgcagaaaatgaactcttgttggatactactgatcacatgtaagaagaagctgagtgccaataatgatgtttcatgaaatactgggacaataactttctcaaggagaaatacaaacgcccttatataaatgatgtttctataattcggatttgctatatataaatttttgatatatatatcaaatatatatatatttatagcatttgatatatataatatatatatatagcaaatccaaattatatatatacacatatacacacacacacatatagatatatttggtagggaaataaatcatatatatatcatataaatatatcaaatcatatgtatatatacacacacatatatatatgatttggatttgctatctatctatctatgtatctgtctatctatctatctatctatatttggtagggaaaagcctaacataattgagtgtgtaygcagagctggtaactgtaaatttctaactgtctaaagttgatgacatttagggtaacaggttcttcagtaggtatttttagtgctgagatgtaagatgcaaaacaacctagacaaaatgaagtgaggagtaattagcaatacaaatttctcaataaattcatgctaatatggatgaaactatcttgatgcatttaaaatttttgttttatagtgaataatatgaaacatatagaaaactgcataaaacacaaagtttagtgaattattttaaaggaaagaaccactactgtggtcaagaaatagaaaatagccaggattctcaaccctcccatatgcttctctctgattaccgtcagaccatccttgtcaatagtgtaatatttagactgatttttacgatgttaatttatttgcatttaaaatatgtttttatcacctgtgtttacatccttatataattgttttgtcaatgtttcaacttatgaatggtctcaagaatgcgtatatccttttcttcttgcttcttgtgttcaacagtgtgtttatgttattgatccttgttgttacatggagtggcagtttattcatttatattgctgtattgttttctattgtatggatttgtcccacaccactgcagtttgtttccatttttagactgctataagctgctgttacaaaaattcttggatatacatcttggatacttttatgcttgtaggtgtatttctgtaggttttgtatccagaagtagaactgcctgcaatataagaaaccatatcttgaactttaccagataacatcaaacccattttcatagtaatttactaatttacataccaccagcagtgcaggcattgccccacattctaatcaagtcttgaatttgtaagacttaaaattttattaacttattgggtggatataatgatatatcctcatgatttcaatttacatttccctgattatgaaacagtctgcaccttttcctacatatttaggctcttcaggtgtttctgagttaattgctcattattttttttttggagaagggtgtcttttgctttttataattgattttagaagttatgtatatattctgaattttagtgttttatcatttaatttttgccagttttgttttcttctctgtggattttatttcaatgccatttatagtatctttaaatttagaggaactatgaattttcatccttattattattrctgtttagtattatctaagaaattactccctatcccccagagtcatgaatatattatgctcaattatgttccaagggttttacagttctgccttccaaattaaggtcttttatctatctagaagttttttttttwtatatatacggggtaagaaaaaggtaaaattttactcttcaatactcttcatttgttttattgagatataatttaagtgcacaatgacttagagtagtcgcattcaccaatttaaccactaaccaggtcaagttattgaatgtttctgtcactcagaaagtgccattattcctgtttttattattagaagcacagacagtttgcttggcctgaaagtttatataaatggataakgtagtatttacacatttgtgtctttcttctctcaacatttaaggtacattcttattttcatgtgtcaataattttgcttgtttgtcttttaatttatattgctgagtggtattatagtctataaatataatatggtatcttctaaatgtcattttctgtttgctgctgtatatacaaatgatattttatattgattttatatctagcactcttgctcagacttttaattctgataattcaactgtagattcttgtgaattttctgcaaattgtcttgtcatttgcaattaataagagtttttgcctcttcttttgttattttacaccttctagggatgatgttgaatggaaataacagtagtaggcatttttggatcgttatcaatctcggagagaaaacattcamcactataccactatactactatatatttataaytaacttagatcagattaaggaaactccatacgttcctgggatatgcataattttatataaaattgcttatacatatgtaaaattataattatgcttatgtttacataaaattatttgatttgctaccaccttgcataagggttttatattgatacttatgactgaggttgcctaaagctgtcctttctgttggattttgaaattaaggtatgctggcctaacttaaatgagttagcaacaaggcaaagcatccagaaccatgtctagtacatcacaagaagttgtggttaattttcattaataactgaaatttcagtagaggggtaatgccatatgtttaaatagcaacagtagaaaagtaaaaaaaaaaaaaaagtgagtatgtttgggtagtaattaaatgactttgtgaagttgttgggagagattttttacaatgtaagagatttgagtatatttgaatgctcacagaccaagccagtagtgaagaagaaaatgaagatataagaaagaaaggtgataattgatagcgatacagtaggggaaaagagaggattggatcaagaattagatggagtacttaaccataggcaccggggaacatcattttccagggtgataaggggtaggggtaagaaaagaatgctgtgtttgcaagcaagtctttatgtttgatgttaggaagttaagaaaattattaataaattgtctttgcttggagaaataggaggcaagattatcttctaattgggaaaatgcagcagaaggcattggcaataatgagactggaggtttaacaacagtggagaagtttcgaaatagctgctgtggcaaacaagagaggtgactagggaatattgaagaaatgccagggctcacatgaggctagagatcaagaaatcactgtagtactaatctacacagttgtggatgtttgtccagcagcattgagcagactgaataaatttaaattaatgtaggcttgaagcttcatcgggttatttttgttttgtattgtgttgctttgtgtttgatagcagtacaacaaggcagtatggttaagaacattggcaaggcaatggttgaagtgacaaagcataaaatctaaactgaacatgaatggcaatgaagaaaggaagagtataacagagacaaagtatggctcgagaggttagtgtgtgttcagcacatctgaagagcttgtatattagtatggattaagtgagagagcttcagagccagaaattatgtttggggagagagagaactgaattcattatcctaaggctgggtaggttctaggcactcatcaagggatgtttgtgagggtggcagaggagagcttcatttagccttctaaaaccagtgtcatttaacggagttctgaggtcaatatagttgtttcaacctgctctgaattcagagtttgtaattgttaaatctctgctattaaaatgatagtgaatcatacacattagattacatctactttgtccttaagtaataactcctgtaattatttcattttttatgttcctatgtcccaactcccaaactgtattgaaatgttctgtgagctggcactatagaggtattatgaaaggcactataaatatttattccatggtaccttgtatacctttgacacttgaaattttttttgcattgttttacaaatttaagcattcttaattttgaaattttcatttttataactcaattatttttctactaagctgcaatttaattactaatttttttaaaactccagatctaacactcaagtaattttaaaagtattatggattaattcatagcttgccagctcattttataaatggggcagttcctttgtataggtattaacccatataataatgctttcaaagatacttatgaaaggaaaataacaccacgcaaacaattgcaatatagatttactagatgtgtgtccaaaatgaaggttccactcccagtttctccatgtctcaaaaggagtgaatggtttttcagttgacggactgtcaagttgtcagtgtttattctgctgccagtggctcagtgtatacaaagactgcagccttatcacctcaagcaggggtattgtcaggtctcataaactaaacagagttttgtctgctcaggatttgaatgtgtgatgtaccaaggattcataatcccaaattttggactagtctttgctctcttggcattgtatgaatgatggtttcatttttttgagtttggtgagaatgtggaagggattatttaattctcactgatgttcatctaaattaaggactttcttactttgataatttttacatgttcttctattttgtcataaggtggtacttatttaacagatggtatatcaacatgttagcacattgtatatacccttgaagataaattcaggtaaaactcaaagtcaaattttgaaatcgctaaggttttctatacccttaaattttgcccaagratgtggttatttctgtttctgttagtcactatatagaatttctaaaaaaaaaattaatttgagcaaaagttattataagaagacataaaaagtaaagattaaataactctacgtttaaggaatcaatatatgtttttcattagaagagttttacrtaatgttgtttgcttatttgtctcatttttgttaagtttgccagtgctgctcacatattattgcagactgawttccagtattaaaatgtaatactctagacttagtgtctttgaactttatcacaaacggaataaggctaggaaaagctgattaaagctggtttcacaaccaatcttaattgcayagtaatgcttaatatcttcataaaagtgttttctcataagttggtaaaataaaatgtacgtcagagatattttacctmctaggtacagtggtttctcagatatacttagaatctttattcgggctctccagctttaaattcacaaagtctacaactttgtgttcttgggcaaacctaatgtactgcttcgcaaaggatattatattatataatctattaattaatagattatataatctattatatattaattaatagattatgtaatctattaaaaatacaccaatttttaatggactaaaatctttaattgctttgtacttataaggaggagagaacagctctgctttcaaatagccagtgattaaatattgcacttgtattcagcattttatttgtattctgattctggaatatctaaaatgacatttatcttttggtattaccctgttktatgttttyttaaagcactttttgcaaactgatattatatcagtctttgtaatataaaacccagttgtaatttgagcccataattggaaaatctgccatagttatttactgtcatagttctaacaatgaattcatgtcttggaaggtttatataatagagagaatctagaaaatattgtgaattgacaatataattatacatataactcttctatgtgtatatgtaaatataattaacttactcttttataatttgtctttcccattacaatgttacttcatgagacaagaactatgtttgttttctgttgtattcctaatgaatggcatataatagatgcttgttaagtatttaatgaatgaactaatgaatacatgtgcatactgatgtaagaatccataagattcttctctgcatctgtaagtttagcagccttgtttttcttctatttacatgaaacataattatttgcatttaaattaacyagaatgttagtgggtgttacactctttatcctcaattcctatcagagttgggcacttgatcaccaaaagtataaacaataattttaatggttaagcaagatatatgtataatttgtttgcaagaatttgttgtgaatagggaaatagtgagtacttaaattgattattccaagcaaaatggaaatacccataaaagtacaagtttattcggaccattagtatttgtacttttaagattattgtctcacagcgagactagatttaacaggctgtagtggaaaaacgtgtagcctttgctgttagacatacctgggttgaaattctgcctctgtcacttactgattgtttgatctttggacttcaaagcaaattgagtttcaagttctrtaatatgtgaatgtaacacatgtaacatgtgaatagtaatacttatctctcaggatttttgtaaggattaattgaaattatgtttgtaggttacacaataagggaaaattaaaataatacctgttcagaaatatacaggaattaacagaattcattttcaacccaacacaagaactacaaagtctagttgctattctgacaagaagctgctatgtgaggtggtgaaagtaacttgattttagatgtggttgacagaggattatacatgacagtcacagtgatagcatgaaacactaacttttttgtttcatttaatgtcctttatggctccaaaattctacaagtctgttaatcaaggcttggaaactataatatctacagttgtatggaaatctaataacagaaaatctgatggtaaacatagcctgcataaacccagtctttatagtttaagcccataattggaaaatctgccatcttcaattactgtcctagttccagcaatgaattgtgtcttggaaggtttatataatagagagaatctagaaaatattatgaagtagggcctggcatggtggctcacacctgtaatcccatcactttgggaggccgaagcaggtggatcacgaggtcaggagatcgagatcatcctggctaacacagtgaaacctcgcctctactaaaaatacaaaaaattagctgggtgtggtggcgggcacctgcaatcccagctactcgggaggctgaggcaggagaatggcgtgaacctgggaggcagagcttgcagtgagccgagattgggccattgcactccagcttgggtgacaatgcaagactccttctcaaaaaaaaaaaaagaaaaaaagaaaagaaaatattatgaagtaatagtatgttgtgaacacaatagcttttatttctttatcccattctcctttatttataatatataatcattatacatttagctccatcagcttttattctgatgtgtcttcaagaaaatagcttgtaccataaagtcatgagatggatatgcagtctaatactttctaacattaccattgagttagactctcaaaatcattgatcccagcagtctcttgatgggtaggggaaccctgcactcttgaaaagtatattctgtggaccaaattgtttcagcttcttagggagcctatctgatttcactgcagagtagagaaaataacccgtatctgctgatgtttagggttactctgagtttctggaagggttagcagctggttggttgagatcacttctggaggagttctacctcaggtaagcagcattcactgcctcttggagagaatgggagctatctcttctggtggttgggatcatgccaacctctccagtgtggagcaaagatgactgatggggtacaattctgtgtccaagtcttggtgaaaataggaacgacttttctagaaggactataaaatctgaactgtttgcttgttgtgatggttaattttatgtgtcaccttgactgggctaaggggtcccaagatagctggtaaaacattatttctggatctgtctataaggtattcccagaagagattagcattttaattggcgtactgggtaaagattacctcacccatacrgataggcatcatccaatctgttggggaactgaatagaacaaaaaggcagagaaagggtaagtttgctccctgtttaagatgggaaattcatgttctcttgcgctcagacatgggcactcctggttctcaggccttcagactccagctgggaattgcaccatcagccccccagttctcgggccttacacccagactgggactgacatcattggctctcttgtttcttaggcccttgggtttagactgaaactataccacccacttttctggttctctagtttccagatagctaatcttggaacttcttagcctccgtaattatgtgagccaatctctcatatcaaatctctgtatatggcatatatttatatttaaatatatatttatatatacatatattcccctggagaaccctgacaataccttggtatgatatcttaccaygtttgagggaagagctaattgtgaggaatttagctactattggcatccatactctcagagaacattcacagacatgaatatgctcataaagagaccgagakagtctgtggtgtcatctgtagtccacatgcttaggattagttgggttaggagttcaagactgtgtctgatacagaggaggcaaagtttagtttccttcccactctactagagagcatcaacagtggggcacactggaatctgtgtcactccaatatctaacagatacacacacacacacaccagtgaagctccagtccagctcaaattcaacaatatgatgtggtggtacttaacatccactgaacaacctaattcctagtttcagccactagtggtractaatgtttaggacccagtactatggtaataattattaaaagaacttatattaggaattcacagaattaagaagcatttgctcatatgggtactcctttagcaagatctcattgtcatgatttaattttaagtgacagatagtgaaggtttatttcacagaaattgcacaagtgggcagacagtgataggagagactcaaagagtaagccattcacccatatgtgttggaagcctaccacagacaaatttattacatgacaacactcatgatatgataggttctgttgaaccaaaattccaggggcttttcattacacctcaaattttctgctttctctgctctctaaatttctctgtagtctgagagaaagatatatatatcttgttctctcaggcctatctggacgcctcaaggggattacacattctcttttagcagtaactaggttttatataatttaaatttgaatagttttgagcattaatttcacaaaaagtgctaatagaagtttcatagttcatttatttggcaggggggtgactctcattcaaactaatgaatattatgtccatgtgagtaatgcataattggaattgtaataatggctttaggttactgatgcttgtattgcctcctatgtctgttttttccagtaattttattttccttcttaatcaggacacctgacccattggagctatttagacatcactaagacattagtcctaattaagctattctgtagtgactgaaaattgattgatacttgttcctttgtttttggtacaaactatggtattaaggaaaacttttttgaaactttgggttggctgggatgcatactctttcccattttaagaattctgctttcagttttctgcatatggctagccagttttcccaaaatcatttattaaatagggaatcctttcaccattgcttgtttttgtcagatttgtcaaagattagatgactgtagttgtgtggtgctatttctgaggcctctgttctgttcaattggtctatatgtctgttttgttagcagtaccatgctgttttggttactgtaaactggtagtatagtttgaagtcaggtagcaagatgcctccagctttgttcttttggcttaggattgtcttggctatatgggctcttttttggttccatatgaaaattaaagtagtttttgttctaattctgtgaagaaagctaatggtagcttgatggggatagcaatgaatctataaattattttgggcagcatggccaacttcatgatatcgattattcctatccatgagcatggaatgtttttccatttgtttgtgtcctctcttatttccttcagcagtggtttgtagttctccttgaagaggtccttcacatcccttgtaagttgtattcctaatatccagagtcaaaaaggaacttaaacaaatttacaagaaaaataaacaaccccatcaaaaagtgggcaaaggatatgagcagacactgctcaaaagaagacatttatgcagccaacaaacatatgaaaaaaagctcattatcactggtcattaaaaaaagcaaatcaaaaccacaacgagataccatctcatgcccgttagaatggtgattattaaaaagtcaggaaaaaacggatgctggagaggatatggagaaataggaatgcttttacactgttggtgggagtgtaaattagttcaaccattctggaagacaatgtggtgattcctcaaggatatagaaccagaaataccatttgacccagcaatcccattactgggtatatactcaaaggattgtaaatcattctactataaagacacatgcacacatatttttattgcagcactgttcacaatagcaaagatttggaactagcccaaatgtccatcaatgatagactggataaagaaaatgtggcacataaacaccatgcaatactatgcagccataaaaaaggatgagttcacgtcctttgtagggacacggatgaagctggaaaccatcattctaagcaaactaacgcaggaacagaaaaccaaacactgcatgttctcactcataagtgggagttgaacaatgagaacacaaggacacagggaggggaacatcacacactggggcctgtcagagggtggggtgctgtgtgggggatagcattaggggaaatacctaatgtagatgataggttaatgggtgcagcaaaccaccgtggcatgtgtatacctatgtaacaaacctgcaagttctgcacatgtatcccagaacttaaagcataaaaaaaataataattctgctattgatttgggtactgtttactccaaggttttcttcttgacaaaaaaaaaagtggtatattacaaaaaaacaagtaacacatattgttgccattccagagagcaaaacttttctactgaaatcattacatatatatatatattttatatatttatatattttatatattatatatatataaaatgtgcatgcgtatatatgtttacatgtatatgtgcatatatataatgttatatatatatttatatatatataaaaaaagtgtgcatgcatgtatatatatacatagaaagagagagaaaggctgtgccaaaaccagaaacattctgtttgaaaactggccttcattttaaaaagtataaagtctattaaaacatggttgtgagtggatagtctgtttcttgttatagtcctggtttttgaggggaggttrttcaaatgtgcagtatttttactaggaccttaaacacataccccctgttaatgtaaagatgtscttatttacctgatggcaaatatttctgaaaattgagaatgtccccctttagtcatgcctttctttcacaatatgtgaaactctgtgaycttgcattcaagaaacattatttctagctatggaaaatgaatggaataacatttattttctccttgttagttggatagttctgtatttaaatgtttcatatttaaaattatctgtgtattgtttatcagaagtgtgcaagtaatttagaccttgatgatgagtaatattttgcctgtgatttgaagtagctcctctctagcactagcactctgattatttctcyctaatataacctcacatgcacaaaaatttttgaagctctatttttttaaatggcaaaaattgatttatttccagatatgatctataacactaggttataaaattcattttaagcagagcttattttaagcaaaactgtatcatgttgaattaatttgtaaccatatttgtaaatattccaattttttaaactttaaakttcaggagtacatgtgcagggtgtgcagatttgttacataggtaaacatgtcatgagggtttgttgtacagattattttatcactcaggtattgagactagtatccattagttatttttcttgatcttctttttcctcccacccaccaccctccacttccaggctccagtatgtgtcgttcccctctatgaatacacgtggttctcatcatttagctcccacttataaatgagaacatgcagtatttggttttctgttcttggattagtatgctaaggataatggcctccttccatgtccctggaaaggatatgatcttgttcttttttatgactgcataatattccattgtgtatatgtaccacatgggcatttaggttgattccatgtccttgctattgtgaatagtgctgcagtgaacayaagtgtgcakgtctttaaaatagagcaatttatattcctttgagtatgtaactagtattgggattgctgggtttagtggtatttcagtctttaggactttcaggaattgccacactgtcttccayaatctgatcccatttgtcaatttttgcttttgctgcaattgcttttggtcttcatcatgaaatctttgcccgtgcctatgttctgaatggtattgcctagcttttcttctagggtttttagagtttggggttttacatttaattattgaatccatcttgggttgatttttgtatatggtataaggaagggatccagtttcaatttcctgcatatggctagccagttatttcagcaccttttattgaatagggaatccttcattttttttttttttttttttggttaggtttgtcaaagatcagatcgttgtaggtatatggtcttatttctaggttctctattctgttgcattggtctatgtatctgttcttgtacaagtrccatgctgtttttattactgtagtcctgttgtatagttcaaagtcaggtaacatgatgcccccagctttgttcttttagcttaggattgtcttgaccatttggctcttctttggttccataaaaattttaaaatagtttttcctatttctctgaagaatgtcaatggtagtttaatggaaatagcattcaatctgtaaattactttgggcagtatgaccattataatgacattcattctttctatccatgagcatggaatgtttttccatttatttgtgtcatctctgatttccttgagcagcgttttgtagccctccttgtagagatcgttcacttcccttgttagctgtattcctaggtattttattctttttgtggcaattgcaaatgggagttcatttgtgatttggctcttggcttgactgttggtatataggaaatattccaatgttagattagaataaaaaattctgaagaaactttatagtgtggcaattttacatataataataaaactcaggccggacgaagtggtttacgcctgtaatcccagcactttgggaggctaaggcaggcagatcacgaggtcaggagatcgagaccatcctggctaacacggtgaaaccccgtctctactaaaaatacaaaaaaaaaaaaaaaattagctgggtgtggtggcgggtgcctgtagtcccagctactcaggaggctgaggcaggagaatggcgtgaacccgggaggtggagcttgcagtgagctgagatagcgccactgcactccaacctgagagacagggtgagactctgtctaaaaaaacaaaacaaaacaaaaaactcagttcttaccataaccaaaattatttttaatttatgaaatgtgtcttcaaattatctcctttggtgaaagtttgaaactaaggactctgaaaaagaacatttaaaaattatagatttactagttctaattttaaaaattaatattagatcgttttaaataaaatttattgctacttagattttaattataattaatgtaaaataatgtacagttaaagatttccacaatatcaaaaaggttttaacaaaacatgaatgtccacattgttcctaatccaaaattagtaaccatgttgaaatccaaagatttactaagcattaaataagtatataaataactgaagaagtaatacagactaaaaaacaaacaacaaacaaattaatccatgtctgtagtttccgtaagagcataagtgaacacacacataaaatctcaaattctatcaaaatttctgtcaaattccaaataattctgaaggaccctttttcaaggtgatatttaaatatttttattccaaaataaggccttatttttaagatgcatagtattactatcaattattatgttcatgacacttaaggttgtcgatataggttccccgagtgttactatttctctacttcttttccctctgattttgttgaagctacaaatattttgaggacctgttattctgattttaaattgtcagcatttcttctagagtgttaaatgtctttctagtaaattctctatagatttaataaataatctaccaaagttatatagaaagctgagtttttatagagttcttttcaataagataaatgtttggagatggagatgctctttttgagtaattagagtcacttttattaatcatagtaattcaggtgcaaaaaatggcttttacttactggtagtgaattttgatttttaaaaattcaataaatacacttttcagggttattaaatcctgttataatagtaaaataatatttctggattttgaaaaataaacaaaagtgagaaatgaatctcatttttaacataattccacaaacagcttggattaatataggttgtgctttgaaatgtttaactagtaaaatgaatgcatctagctgagtataatcaccctgagtaagtcacttgatgctcatgaagagaaaagcacttatccactgaaaacttttccaagcaattcttaatcagaaactatggggagttttattgctctggagtacctgaatcaaagtagttttgtggttttaaatggaattgtatttgaaatgctttgcttgagaatttcttcttttgattctttcaaggttgttatgaatctatatcccaaaatgagatgagaaatctatcagtgacaggcttatgcattttagaatgtctgattatagccatttggagctgtaatatgatttgaataagtgcactttcattaaataagagacagtcttttttaggattgtgggggaaattgcatatttctttctctcatgtaaagtgttacgtttatgtatacttttttcttccaaggcaaattggaaattggataattattcttgggacaaacaaagtaattacaatgcaggggttgggttgtcattccaacgtgatttttatttattgaaagtcatgaaataagatttgtttcaccttcttttcctttccgtggttgtcacattctcagtcttttacaaacaaacaaagaaattcaggcctcctaaatgctatttattttctagctgttggtgttagataacctaattatacaatagtctcttccagayattttctttttcttatagcttatagctctcgtgttagctgtatctactttaaaaaataaatacgtgaacattttattcattcatatacatactaatgtttttccaagtaggcattattttttctgatgaatgcgaaacatttctgaaggaccatacattaagaaaaaaattagcaatcatttggtgaaacatctctatcttacatatatatagtgcctaagttttgtgggttgaatggctttcttaaaaaaacctttagtttgttaaaagactagacttctagttaggtatcttttccatagacttgtcttctcccaattccaaaacctttacttattagtgataaatagtaaaggagaaaacgtttttgttttgtttttgtttttcatgtgtttgctatgatgtggattggtttgtccccacaaaaactcatgtttaaatttgatcctcagggtggggatgtgtttggttcatgtgagtggaccttttatgaatagattaatgccttctcactggaataagtgagttctcactctcggaaggctggattaattctcatgggaatgggttagttcttgtgcgaaggggttattataaagccaacaccttgggtcttgtctctttggacatgtctacttcccctttgaacttctgccatgttgtgacacagcatgaaagccctcaccagaaaagatgaaggtgctggtgtcatgcttcttgaacttcccagactaaggaactatgagctaaatagacctttattccttataaattacccagtctcaggtatcctattagagccccacaaaatggactaagacacactgtaagtacagacaatctctatataattacagttttatagttatgttatagtttattaaagtccaagaaaaaatctattttaaaaaaccttacttataaaaattgctcacatttttctataaggtaaatcaattctttcatgcttttctcttgaaaaccctgattgctgaaatacaaaataatttttggctacacttcttcctattcttttgactttctcctacaatattttatgtaatatttaacttttagcctttttttcactgtccacatttttgatggtagaagtaatattcccgttcattttttcaaggctttccttttctttttttgaatggcaaccatgttttaacttactgaggacttcatattcagttttatcttattgttgctaacagaaatatattttgattgaaaatacattggtgcactagagagtgaattgtaattttggacraagtattttcaaaattatgttatttagacaaataatcataagtagggttttttagcgaaagtgtgatttttaatttttgrttttttttttggtcacaatgtagtcacacaaaaatatgatggggctgttatatcaatccccttttccaagaagccatttgggtgaatcatggcatagcaaggttagacctatattgaggaacaaaagtcacaggttgcttcaagatcatatagcatcatccaaaggttttgagtacttactattggtaatctttttataaagaaaatatgatagatagatagaaatagagataatataaatatgatagatgatatggatatagacatcatccacttgagaaaagaaagataaataaatgtaaaaggcaatatagaccaaatacattctatattactaatatgtactgcgagggaaaagggtcaaatatttttgaattgagttattctgtacagtgtgctatagttttgtgacagacatacaaaacaatttgaaactgcttgggtcttatgcataagtagtgacatagcaggagataccaaaatctaaagttattcaaaacattagaggattgtgacatacttttatgttggctgtatagttttattaaagcatctaatttaatattatttgcttattttttgatgcacgtgggacaaaaaagaaatagcagtaatagcaggagagaagcaagaaatctaacaacttaacgtttaagtcaataataagtagaaaaagaaaaatgaagctcattccgaatgatctgaaacacagaaaatgacatatatgtagtgcctagcattctaatcttgtttatctgatttacttaataatatcagcaatagaaattgcctgcaaatataagagatatccaagaaatgaacagaaattttgattgtttgatactgtagcttggttatagcaatttaaagatcattgaggtagatgaatgatgtagccctgttacattgtaaagagtgatgcatttcacttcagtgcaatgacattgggtttaagataccattcagtagaaaatgaaaaccaaaaatttattgattagtctacagatagtgattttttaaagaaatggcataatttaagaaacattttaatcattttccttatayagactattaactttacaaatattgagattgtttctatagatagaagacatttaagcctacaagtaataaactgaaaatatatttctyttatcttcaagaattctgttaatattaaccatttatcaaaaagaagtatcataaataaaatattccaatgcattttgtatttttaatgttaaaatgtcaaataccttcctttaattttgacagcattttatgaattatctttctcatataatataatgaaaatatactttttgaaagatagcatgatgtgtgagtgccctacttggtaatatctatttattatttcctgatttcctaatttattcctacttcagcaacgcataggaataaaatataattttattcactgcttattgctgaataaaggatttaccacataaaaatattttatttttatagaattattacctctggatataaaatatgtatatatacatatacacacaatatgtgtgtgtatatatatatatacacacacacacacacacacacacacaatactggtaatactaatatacacaatactggtaatactaatacaacacacaatactggtaatactataatcaattgcagaccatacattaaaaaattttattctcatggaagcatgtaattcttgattaaaaagatatagttttkttgtgtttgaataattaagttttcagcattaataaaagagcagtgaatgtgccttaactaacaaaaataaattggatggaaataaaagacaaacttttcacttgcaataaggaaaaaaaatgacaatgataaaaactagcaaagatatttaagtttgggtgaaatagaataaaaaattttagtggaccataatgtcagagaagtagtgttacctctcccaaaaagctaatgaaaattactgaaatcattaagaaaattatattggaggacaaactcatgaaagaattaaagttatatcaatattactttcatgtatataatgacagacacatggaaaaaatggaggtgttttatattatttcaaagacatgttttgaaaaaaagactcagagttgtaaagagacaaatgtggctttatgcattactcctttagtgcattatgataagatttgaaaagcagcaggatggtgcttatcttgacccaaaatatccataaggtgctaaatagtttgttattagttatgcagtgccataactaatattaaatgacagcttttaaaataatctgaacctgaaggattgtcatttaaagctataattaaccactacaactaatgcatggatttatttattgatctattctttctataaacaacatgaaagtaattaacaaacacaactactgcaagattcatttattatcctctcttttccataaacagaatgaaagaatcagaccacagggctctactgggaaaatctggccccaggtgaggaatattaataaggactgatgtgctgactagagtaccactgaggcagcgaagtcaggaagatgagtcttcacagaaagggaaaaaagattaaagaaaaaaaagtattatagagatgctttgcctatttttcccttttgctttaagttgatcttggtgacattctcagagtgtaaatatttgctcaattaatcctgtgtgaatagatgaaaaaaatgcatgatgataggacaagtacctaggagacaagttggttggccttacaaggattgccctacagcaccatgcagaattaagatcccaaactgtgaagggatttaacttgtcactagaatatcatttaatggtattgctgtaaatacacagctccatatcaatcatagttaggcacttacaatcccggagtatccagtctttgaatagttagttttccagaacccaaagaaatcaatattccttttcaaaatagtctcgactgtgttcattaccttgattttttaaaatgatttcacaggtgcatatatatgtcaaatcttaccaaatgataggctttttacatacatgaaatttatactgtcaataatttaataaagagattttcaaagccaagtgcacagctaattaagtaaataaataaaatagcattgatcatcaggatttatatttttatttttatgcaaagcctttgactattcagttattttttaatatattttaccccatatttcacaagaaatgtgaatgtaacggttacatgtagagttcaaaaactatgttttttcaattcattttataaagaaggttaggctaaatagcccttttaaacatacatatcatcattcaccttggttttaagttgtttttcttaactatctgaagatggctatacttaatattgtctaagtgatagggggcatgtgttaaaaatatgtacatttctactgcctttgctattagtaaagcacacttaaatgagtaagaagagagagaattttttaaacatagcttattgcccatgtgatattaaaatttggttttctctcttagttttcatgggaagacttaggtaaattagtattttacgtaggaggtatgtacaaaaactgtgtcygctattaaattattctaccttgaattgtgattttattacatataatgcatgcttattttggaagtgtgttataaaaaccattgatactttgccctactggagaggatgattcttactagcattctgataaactgtaaatccatggagtttatcacaaaagcaattttacattattttggaaacaaaatttcctatatagtttaaattatttttgattctatatgttatctttatragaaaaaataataaagtttcttaatgtcaaattttaataatcaaaatacatctattaggcacattgcgtacatttttaaaagccaagtaaaccctgtagtaaatataaaaaaagaatattaaaataacaagataaatattatatatttatttatttatttgttagaagttggacacttaaaagggtgacagcctttgcatacgactacattaaaacaatttaagttaatttaagtaaaggaaagaggyattcaagcatcaactgttatttatactcaaattatctgacagctttatgttgtgacatttggtctttgcaaaacactcaaaatataagtcattgctctgtaacctcacagtcagctttatattatggtagtcatgaatgccagtttgtacccaacgttcataaatcctactgcctttttcaacaggccaatcacaggatgatcatagggtttctgattcacttatagtgaatttaggtgaaatggaatataaaccaatttctctgaaatcatctaactataaagttgtgataaaagagacatggtgtggcaagaattatactgcagagatctttattacattcaatggttgacatcctgggctggtcctaattaaaacattggcctgtagaagccaaaagtaacttccaaggcctaacaagcacatcattctgtggcctatggcattcattcttgagagtaaggaataatcagtagtagaatgggcatcctcttcatcatagttccctgggactgagggttagatgtgcatgatatagtatacctataatgaatcaacaaacatagatctttctcmaactttagttcaactaaaagtcacttttgacacatgttaaaaaaaaacatcaatactcaagctcggttcccagagattataattgagggcttttcgaaaggagctcaaaaatctgtgtttttaacaagcagtatctgtagttccaccacactttacgaaagtgctttataggaaacttgcaaagtatagggaattaggaactgtcaaaagacatacaatgtgatccttgcacctaagtggcttacagcctctttgtgggacaagtcatgtacacaatctaactcagtattagtgacaggttcttacaagtgccacattacaggttgtgagttctagatgaaatcctataattaagcactcactcaggctggaattgccagggaaaccaggaaataatagaggaaagggtaaagaaaatttcaagtggaatgacctgtatatacagaatagagagatgcgtgggcctggcatatttaagaggataactcttggatagatgcttgaataaaytgatataatagattgaacaatatattataaagagaggagtatatattgtattaacagaggaatttgtataggagtatgtattcctgtagtggaggattttgagaaactctaaagatgtagctgactaaccatctagccgtctatttaatctagggtttggcaaactttttctgtaaatattttaggctttgtgggccatgtatgtctcttttgcatattcttccttgtttatgttttctgtatatatgtatgtatgcatgttacatatatatatatgtattttaattttttaaatatgtgaaagaattcttcactcaaatactgaaccaaaataggctcaagggccaaaccatagtttactgacccctgatcttatccgtccagcttctggcttcttccacaaagggtttaaagaaacttggagaaataaaatatgtatattataaatattaaatgtataataaaaaattagcaagtaaaaaaagtcaatacctaataagggaaaactaacaaaaatatcagttactatatttgagcttaagaatttggtttcaggctttcagaaacccagtcaaaaatttgaccagttacttaggtcttatatattagggcaataagacaagccagtctcccttcttagcattcctttctaaagcagtgcctcacataggacttcactctcttcaacagcttctgtaaaccaaatgcaaataagcctgttttgaaataattttttgatgaaagctgagaacgtaaaccataaatgcccagggaggcagttatgaagaatattaaggattgtggcccaaatatggagtcttcagtttctaggctgattcaagaagaaaacataaaatatgaattggatatttgtcaaatcattatatacatatattttccactttgatttacagggaattttaaatcaattgcttctttttgtctaattatataaacttacctacttcttatgcaaaacttggaaaagaaaaagaaaaatcattcgtaatcttactactttgaataaaattcctgttgatattttgatgatttcctcttattttacatacgttttataactctataaatgtattttaatgttatcatttaacttacgcaaatattccaataactcttcattttttggccttttccatttttgcccttttaagtgttggaataaatgcaataaatagatttctaaaaaaaatgaaatcgctatactaaagtctgtagcattctaaagtatttaaatgttatttctgtttactattaaatttttttttccgttttactctttcaccagaagttatgaaagtgcctatttacaaaaatgtaactccttgttccacttatcactactaaggagttacattgctgtaaacttttgataactataggaaaaaaatagtgccagtttccatttctgttattactagtaccaaataattcatttttctcttttatttctaattatgcatatttttctctcatttatattttaaaagcctagtatttttaatcaatttttcgagatctttccatgccaaggattttaatcttttgtcatattttttaatcatgtttatctaatggatgatttactttttagatttattttgttttgacttagaaaaagtagtaatttcaatacagtcaaatcactttccttatgatttcttctactgacttctaaagaatgaagccgttactcagcaagatatcagactcataccatctgcttcctccatcccccattgtgtggtttgaatatttacaattatcttttcaatccatctgagatttttttttgtatggcattctataaagaattaagtggacattttttccaaaataattgaataattttctatatatggaaaaatatatccttctcattgatttatgatgccttaaattatgtattatattttaagtatgcttaaaatcttagtatattatatttgaattaaatagatgacttgctttcatctttgtttcacaatatagttcatttggcttataattagtggatcatcttgacagagtctaggtgactgatggtcttatttttaatttgcagattttcattttcttgtcattctttaggggttagagtgggtaatttgaaaagacatgtcagaaataactacttagttaaaaacctttgtgaaaagccaaaagttttatccttcgaaagcaggctactactggtcagtggcaatgactctacatcattatagagaaatatgcttatcttaattgctatgaaatgggagcatagaagtcaactgaaagcagtttcaagtcattgaaatgaatttgtttgttttagggcagttcagaaaagagttgcattttgcatagcttgaaattatcatctgatctctgatgaccattcttgctgaacttgtcttttgcaatgctattaacacacaggttatattcaggcagctaattgtagggcttctatgttgaactcaagtttagtgcagactttttgtccagaaattcaaaaacctagcagtactcattgacacgtgcaaagaatatgttatttttggcttatttataactttgaccacatacaatattgaaagcagtttctctaattattcttcattaatgattgcactaagaatccaacaggtaatttataagcaaaggaatggttttgtcatttcaaggaagatgacttctttattttacttaaattatagtatgagtttttccaggtaaggtcacagcaaaattacagttaccaaggtgacaataattagaccccttgaagttttaaacaatggcaaaataatcttaattattgtttcaatgtaagctttccagcaaracaagctatttgaggatagatttttaaactttagactgaaaatctcttgggtatgtgaaatccaaagcacttacacgaagrcatgggaaacctgggaaaaataagctccatggatgacttttggtttctgtgttcctacaatttctcttctcctgaggacataatttcagtgcctaggtttaatctcattattggtcctgagtcccccacaaggagttatgtttgagttttgaatgwtatatatatatatatatatatcatttgaattatatatatatatcatttgaatgwtatatatatataaatatatataatatatatttattttttgagatggagtcctgctctattgccaggctggagtgcagtggcacaatctcagctcactgcaacctctgcctcccagattcaagtgatactcttgcctcagcctctcaagtaactgggactacaggtgcccgccaccatgcctggctaatttttgtatttttagtagagacggggtttcaccattttggccaggatggtctcgatctcttgacctcatgatctgcccacctcagcctcccaaattgcggggattacaggcgtgagccaccgcgcctggcctaatgttataatttttttataaaattaaaattgcatacgtaactggtagtcttttcaggattctattttggtttttttccctcatgaaactatttaaagctcatttgtcaaatcaggaactggaaagataaggtgtacatttacctgcagttgagacataaaaaatctgttttaaaaccaaaaaatgttttaaaatatttataacaattggaggcaggtgctgtcttttacttacaagatttaggaaagcttctctccatttaattctttacttcctaatctcatcaatctaaccaagttgtggacattctgaagagccaccttatcaaatgagtggaaaatgattaatttagaaactatagtaaatccttacttaaggtcattgctgggttcttggaaaccgccacttcaaaggaaattacatataataaaaccaactttcccataggctaattgatataaacaagagctaagttcttagggcatatttctggtcagagaaacattaccaaacttctaaataaagacccagaacaattctaacatgaaacattgaaataaatgtgacctatgcatacttttaagaaagataaataaaaacaagtaaggtaattatttactcaattttggtgaattagtgagtgacagtgattgtggtggtgagtccactgaaggaataaaggtttacaaagcgaaaatcttaaggagcaccccttcccaccatgcagttcaaaatcaaacaatgaaaaatatggcagactagaggagagctttagtaccccatcatttcttgttgcatttgtaggattattatctcctttaagaatttttattttacaatcatttgtattcattcatttattttccaaccagcttattctagttcagggttttgggtggctggagcctatccctgcagctcagggagcaaggtgggaactgacyctaataggacactattccatcacagggcacacacactcctacacactcactcagacggggatcattcagacatgtcaattcatgtaatgtgcacatctttgggatgtggaaggaaacgaatattcagagaaaacccatgagagaagtacatgtacactccaaacagacagtggctctggccagaaattattttttttctcatcaacattataataaaacaacattgaacaaaacaattttattcgaggacctaytgtatactaaactatatttcatagaaggctaattaaaatgtagtctgtaacactgtttgctaaaggagagaaaaacagcactataatccctagacctactctataagccacctgtgttgttttatatattcagaacataactactattatttttacacacacacacatccacctgttcaccactcccctcccacacacacatacacacacagcccaaaaggttgagtgtatgacccaagctagaccagccaatcatggcatcccacacgaaccccatcaattggcccagtaatgaacatgtcacttgtatttttagtagagacggggtttcaccacattgaccaggctggtctcgaactcctgacctcaggtgatccacccacctcagcctcccaaagtgctgggattacaggtgtattatcaactggaatccttttccagggtttttataagggaaacttgttaaaaggggatctctttcctcttgagtctaggctttatgaatgaaagcccagaagtacgtgtagtgttgggttttggagataaccagactggtagaataaagtcaatgagaaggtgagtggcatagaaagattacaaatactgttcgaattcttggaccgtgtactcatcacgtaatttctcatttctcacccctctcccaccctcccacccttctgatctccagtgtctattattccacactctatttccatgtatacatgttatttagtgtccacttgtgagaacatgtggtatctgacattctgcttctgagctgtttcacttatgataatggcttccagtttcatccatgttgctgcaacaatcatgattttattctttttatgggtggatagtgttccattgaatagtacacacatttctttttttttttttaattttattattttttttattattatactttaagttttagggtacatgtgcacattgtgcaggttagttacatatgtatacatgtgccatgctggtgcgctgcacccactaactctacgctgggctgggctgggaaagcctgcactcaagtccaatgatgggcacaagtgctggccacaatggggatcagaggacagtcctcgggcctctggagaaatgccccagcagggggtggagcaaccactgctgtgtcaaagacccagcatggagaaagaggtgcagcctggtttccacagcctagcaagtgatattgggacctgatgcactgtcatactgccaacctggcagggctttctcccgccacccaaagctagtgctaagtcagaatacttagctgagtcacacacaatttgccttcagaccacgtaactgcccaaggtccaaattcgccacccgggtcaaaaccacacctctcaggctaaaaccctctcagtccagtcccacaaaggggaagcacacaacttgagggcccatgctggagcccatcccacagtcacctctcagttctggctttgggagttcctccctaattcaagacaagatcacaaaacccagcccaagacactctgaagcagtgactgtcattcctgctagctgcttaggttcccatacagccctctctgagctaggattggtgtggcacccaggtgtgagatccttcctagtgtcattcctgctccgtctctctgctactccccaagtcagatctggggtgtggtagggtcaggacgctcccctgcggcctggattgcctggctatctggtgggaatgtgtattgcagagacactcacctgctctcacacactaggaatttactcacaattttctgctggatctcaccacaaaggattctgcccattttcttttttctgttatccaaaattttcttttgctttaatgttgaactcctgtgttccttcttggataaaagttcacagtatcaatctctacacactattttgctgtttccaattgggtgaagggtgctaacaaagcttccattccaccatctggggaaaaacactcaagaaagagaaatacctctgtcttcattgtgcacttgtggagagagagagaatgagctttttggtctcatcttatagggacaccaatcctgttgatcggaaacccacctcatgacttcatttaacctttatcacctcctcataggccccatctccaaatatatttggggttagagcttcaacatatgaatttttgaggtggacacaaacattcagtccataacaaaaactatagggtaaggactctgttaggataaattcaagcctttataggactacatcattaggtcaaatggggcctcccacaatgattttcatgaaataaaaacagatttaaagaaaatgtagatttcataatgtctgccacctcttacatgttacattttacctaactcaggctagagggatcacagaagatataattatataaatgaatatatagaataactgtgggtcaaagatttattaaattataaccacatatctaaactgactgatagcaggtatcttgtctcgaaaaatataaaagcactgagctaaagcacatctatcttctcggagagctgaattaggataggaagaaataaatgcttgttgtatgattctggtagcccacggccaattatgttagattgatggagaactgagtgaacgagtctccctttcctgagcctatttttaaatgatggagagaaatacaagttttatgactggacatcataaaattatgataatgactgaatctatttcctgaaaccatatgtcttacagatatgtaattttgaaatacaaaaaattttaacatgtcagtatcttttaattcagggtcacatccaggcatatttcaggagaattttattaaatgctaggaagactagaatatccatgtctggaataaaattatagtcagtttaatgcagtgattcttaatctttttgcacattaaaatcacctgggaagctgttaaaaaatgccaatgtctgtttcccaccccaaattaataaaatcagagtctagaaataggatcaggcatttttaaaaaaagtttttggttaattttattttacagaaaatcactgtcctaatgtggagaagmaattaagtcattgtctaaggcagcaaatagtttaattccttggtctaaaattagaaggtccagcctgtgtagaccaacatattcttgtcagccaacttcatatgaggtgcaaagctcactgaagtgtcaagacaaatcagtagtcaaaaggaatcaaacattactgagtggcaactgaaaatctcaaccyacatttggaatggtcctagagaagtgttatttcctggaactaaatggagattggagacattcagtgtggctttctgtttgtaaaatccwtygaggggataattcttactaattagctccctttggaaaagtaattgggagatttagtcataagcagcaaacacaggaaattcactgcaacttagaacctgaactttaatcaaatatcccttcagggacttgagtctttataaaagaatatcctgttttttcctggacactaggcaatggaaaagagcatcacatcctaggatgccttttggtgcactaccaaataaggagtaaaatttgtggtgaccatttgaaatactttctttacctatttgcatatgatttctataatcctttaggaataactttgccataatcatctcctgttaaatacttacaataaggcaaagacatagggatgctgaagtgttcagttttttccagtaagtaaagggaaccattaaaattttctgagcaagtaacttacatgcatagagaagttaaggaagttgactttagaaagatatagttgaagaaggagaaaaaataggcaaagagatcagctataaaatcatcatagtaactataccaaagcagataggacttcaatataatctctctctctcacacacacatacacacacacacacacacacacacacacacacacacacacacacgaggttgcaggattttttaaatacaaatgtaaaagggtggcaaatgaaaaagtttaagttgtagcaataagatgcaatgccgattacactctaaaatagataaaattctaaaatgaaaaatcatcaaaggaggatatagtaactgcttatactattctcaaatgtccttacatcaagaacataagtctgccaaaggttagagacattttggagaagacttctctgtaaaagctcttaatgtgttacgagtcttactgttacagcacatcatcctatcctaccaaggagagctggagaagaattcagcctcacctcgaccgagagaggataacataatatgtattttcttcttcttgtttttgtttttgttttgttttgtttttttttgaggtggagtctcattctactgcccaggctggagtgcagtggcacaatttcggctcactgcaacctctgtctcccagattcaagcgattctcctgcctcagcctcctgagtagctggaattacagatgcccatcaccatgcccagctaatttttgtatgtttagtagagacagggttttaccatgttggccaggctggtctcaaactcctgacctcaggtgatccacccacttcagcctctcaaagtgctgggattacaggcgtgagccaccgtgcccggcccataatatgtattttctataggttggaggactcagaagtgtagtgactgattttttcatacctggaaaatttatgcatgattgactaagtgcttttatagctaattaaaggaaagattgaggctacattatatgatttgaactcgcagtgtttatgtggaaattatatatgtgtcccatggaccagatataagccatttagaagacagaatatctcttgtctgggtcaacctggtcccattctgaagcacgtagacatatctcagtagagagaatctgaaggtcctgatagaatgccaggggttcaggaagaagctagcaaactggtagaataaatatgaactctgtgtaatgagaacatccataaaaatgtgtgcaatgctgggaggtgggggaatgtcatggtctccagagaacgcatgaaagttgtaaatctaggaccaggaacaatgaaggggttttcctcttctgcctttctgtgctccaaacctgagggagccagcaatcccggttaggaagctgagggagcagaaatcatagtcatggcctgataatgagagaaaaagtcaactatatttycccagctgtagatttcccacctgcaaaaggcccagattagaggagggtagaagcctcaatatctaaccagggccagagtttgaattttcactaaggttagaggtttttaaaattgttgaattttaagaatgtgatcataagtcactctattgcttaaaaatacacagaaaggtcataggacctgtctaaattttttgaaaagtaaggaaaaattaacccagcagaaaaaatttgaaagtactctgagatgcaaaaaatatgattatttttattgtactttaygaatgttgcttatgcaatctaacattaacaaagctaaaagtcaagaattataaactactaagaaatacacagatgaataattacattttatgtctttgtagcattttataattttacatgtattctcttatttgatcctaaatattctgaagataaaatagaaataattttcttcattttatagaagaataacctgaagattaagggtaatgagtgacctattatatgtgttgaagtaggttttaagttaggaccagaatccagatgactatctataaatcttacccaagggcacagctccttaggtaagaagtagcctttgcaattttcctgaaagctgttttcattaattcattcagtaaaaattattgaccttctaccatgcctcaggcattgataggaattcattagggaagaaatcagagaatcccacttcttgcatmgaactttcattctaatacagaaaggcaggcaataaacaaacagaacaaataaaaggatatgtcaggtggcaaactttgtgaaaatataaatatggcatgttaagacagacaacaagacagagactattaggaaccagagctgctgtatgttatgtaggccatactagagctgggctgagcagaagggccagaggtgggtgcactttcaaaaagcaaagaggctattgcagctggagcagtgagcaaagaaatgtgctaggtaggagatgatgctctrgcgcaagggagtgcatggtctgagaaggaggtcatatagggccttctaagatcttccaaagacttgcaactatgaactattcaccrtgaatgctatgtgaagccattcacgtgctttcaccagaggggtggttttgcctggctggttttgattctgttttttaagataattctagctgatatgtaagaatagatgccagcaagccatggcaggagtgagaagactggtgtggagactactgtaataatggtccagcaagagctagggtggcagtcgacatgcaraggcatgttttctacttttttaactttttattctgcaggtggtccttcgctggtctcayactgcatttccttaggtcacattggtgcaatctgtaataaaagatgcctcaatgacaaaattgtttgctacatggagggattcctcactcccatgtctggaaatgaaatcttgcaggtcattaccagttaagataacccttgaccatcctttgtagttcactctgcctttgcaccatcatcctgtcagcagatttctctatcactgaatgctatttattttctttatagcactcattataaattgtaattgtacatttatatatgtatttatgcagttattgttcatttttctcactagactctatgcctgcagaaggcaggatctttctctattttatttctatttatggaatgcctagtctacaatttgacacaaagtagttaataaaaattacatatgaatgaatagaaatagtttgacttttactttacttctaaggtatcccagatctctttctcttatctctatctaaatgaaaaagctaaggaaaatatctgaatgatttcatttttaaaaagaaaaattatttaattgaggaagaaagagaataccctcccctcatttttcaactacattgattatatttttgtggtagtcagaataatatccccccccccaaaaaatatccatgccccaatcctccaaacctatgcatatgttacattcctgaggaatgtaatggggaaagaggaattatatgggaaagaggaattaaaggctataattatctggctttaaaatgagggattgaggattatctgggtaaggccagagtgataacatgggacctaaaagggaaaaaggggagacagaagggagatcagagggatgtgccctaagaaagacaggccctgccattgctgaatttgaagatggagggattgggccatgagtgaagaaatgtggatgcctttacaaggtggcaatacctctcagtttaaagctagcaagataacaaaaacctcagagaactgcaaggaactgaattctaccaacaattgcaattatcaaaagataaattttccttttcattcccaaagaatgtagctgtgcagacaccttgattttagcctggtgagacacatttgggactcacttagtattcatttagctatttcactttttataatgcagaatctgcmgatattataatgcaaattaagatctttatgattagcatctttgaaaaaatactttttttgtttttaaacttcatatatttttgtaactattttgaaacataatagctgatgttatcggaatatatttgcacctgaaaactgtttcctcatatttttatcataatattaatattcttaaaatcctgcagtggcattgatagtaggcaataaaatcaagatttaaattttaaaaatgttctagacacagttaaatcttaattatgccatttgcttaacaargcactttgtaacaccttcggttacaccaaaggcacttcggggttttattgttgtattattgttattactttacactttctgtcctacaattataactgaaagctacgagaytggatttcaggaaatgagaaaagttgaaaagcaattttactgtaacttctcagaagaattactagcagatttaagaaaaaagaagtaaataatcactaccaaaattaggtaatggtctcatactgcatgtgggtaattcatgaatttcatttcatatcacttctcatttctacaaggttttaggtacaatatgaaaaatgctcatagacacttaacatttgcccgagtgacagagactatatcttcttgtttctttcttccatgtaccagtaggaactaagaaactttgaagcatattcaaagaattctgtttctttggtaggaaggctggctgtgcataaaggctggctcctgctgcatggttagaatcttgagatataatttagcttttcagaaaaagacatcatgtacgtgtcacaaagtctagtctctgaattttttttgtttcttatttgctgaaaaatacctattctacttcctgaagcaagttcatatatttaaaaatataacagctttattgagttataaatcaaataccataaagtttatgcttttaacatgtaaaattcagtgctttaaatatatccacaaagttattcaaccctcagggctatctattttaaggatattttcatcactctaagaagaaactgtacatccaatagtagtcacccccgacttcccccttttctcagcctctgacaaccattaatctactttatctttctatgaatttgcctattctagacatttcacataaagggaaacatatgatatgtgatctttgtaactggcttcattcacttactattatatttttaagatttaccactgttgtagcttgaactgatacttctattcctttgcattgataaataatattccattgtctaggtgtaccatattttatttatccattgattaattaataaacatttcagttgtttccgcttttcctccattatgaataatgctgttatgaactttgtgagcaagattttatgaggacataatttttttcatttctgttggatatatacatatatatatatatatacctaggaatagaaatgatccttcctttggtaactctatgtttaccactttcaggaactaccaagttagtttccaaagtgaccatactgtttagtgtctccattggcaatatacgagggttcaatttctccacatcttcaccaccacttatttcatgttatttgttatcattcttattattattgctgctgctgctgttgttattattgcaatcctagtggatgtgaggtgatatctcattatgtttttgatttgcatagttataataactaataacaagcatcttttcctgtgctcgttggccatttatagatcttctttggagaaatgtcctttcaaatttttcgatcattttaaatcgggttatttttctatatttttaggttgtaaatcttctttatataaattggatataaatcctttatcagatctatgatttgcaaatattttctgcccccctctgggttttattttcacttccttgatgttatcatttctagaataagagttttatattttttgaatctatactttttctgtgcttagaacttttattgtatctaagaaaccattacttaacccaaggtcccaaaacttttctcttacattttcatctaagatttttagagttttagctcttacatttaggtctatgatatattttgagttaatttttgtatgtgatatgatatagtggcccaagttttttcttttgcatgagacatccagtttattccagttccatttgttgaaacatctattctttccctatggaatggtcttggccctttgttgaaatacaattgactataaatatgagttcttatttctgaactcttaattcaatttcatcagtacatatctctgtcctaataccagtccccactatcttgatacctgcaacttgtggcaattttgaaatcataatgtgtgagtcctccagttttgctctttttcaggatcatgttgactcttctgagtctcttgcatttccatgtgaactttatgatcgtctgtacgataagcagtaggattttgatggggattgtgttgaatctgtagatcaatttgggaagcactgtcatttaaacagtattatcttccaatacatgagcatgtctttccacttacttagatctttaatttctttcaaaaatattttgtagtttccagtgtacaagtcttactcttgttaaatatatttctattttgttctttttgatactattgtgagtgacattgttttattaaatttatttttgattgttcattgccagtatgtagaaatataactgatttttgtacattgaacttgtgtcctaaaacctgtgtgaagcagatacctttttttatatgtactgtattgccacttttaaatcaaatatggagtggctagtaaaacttttactcctaagctttatttctttattaaagcttataataatttctttaagcagaggaagtatttacctaataccttctgcttccatagccatcaataaatattttaataaggtactgtacaaagcaaaatggatttaagaagatatttgatatgctccctagtctctataagcttattatctagtggaaaaggggatacagatgcataaatgtttacatgtagtgttacaggtcccatagttgatgcataatacaaactagtaagttatctaccttgtttgaaagtagatttacctgtccttttatgcttagaaagaaacttattgtattttgttttgcttaactcagaattttaattaagtaagtaatctttgaaaatagaataacatgtccattattttgcttacaaaatactgataattgtaacacaatgaaacataagcagggacctgacactggcaaagttagcatatttgtaaataaaggtttaacagttcgcatactttatctttccactataaatgttttaagcacctttctaacttattaaagatatttcaatttaattttatatcaaaaatcacaagacatttgggctttaagactttccatcgtcttattgtctttaataatatctctgtggtcagttaatattttaagtactttttggctatttgctatgaaaactttaaaataactatagttaattttaatatacagtgattattttaaaatgcacctattatgtaattatttactattgctttctaaatttaattacacattgaacatattagctaagtgtaaatatgatatgcatattttcattgcatgtatttaagtaaagcaactcttatttaaaaccaccactcctatccccacttcacccctttcacacatttgtcattcctaaagtatctgcccctctttgcatctgttagtcactgtcatagtgtctggaatagtaagtatttatagtgttttcaaaggaaggaatgaatgaatgaacagagggaacacgtattgaattttcaaggaagtataaatcactatgaaactgagtattgagagaagtttytaaagacactataagacacaaaaagatttataggatttccataattagagaagaaaagacaagggatttgaggtatgaacaagggtatggaggtgaaaatgtgattgcatctgaagaaaatgagcagataaatttgactggattagacacagacatgggcagtatatggtcctaccaaattttacatgccagaatgggaggcaatggatgggaacagggaaacatcgataatgatttcaagtttccatagtaggttactggaaggatagtattgctcatgttaaaaactgagaaaaccacaggataatttggctttgaagaaataattttgactttaaaaaaaaaaaacatgttattcggtgagacaagacacctcaatagaaatgtctggtaggtaatcagaaatgtgagactggcgcttgaaggcaaagactgaagtagtggtatgggtttgagagatagtcgttaaaactgtgagagtaggtctcagaggaagaaatggttatggtgcaacacggggtggaggaatggctcttagtgctagggaaggctaatgccgaatgggcatgaggaagaaatggtgacacaggatgagaagcaagagtgtatggacagaacaaagcatcccattatccacaaaatagtttcaggatgaaggatgcaattcattcaattaaaccttatttgagtatataatgaatacacaaaaaagattttaagcagctcatagtccactgaagaaaacagaattttaactggaagaaaaaagagctttacagatataggaaaactcttattataagatcataggaagaacaactttgcataaagaagttaaagattatttcataatgactttctgatgtcttcaaaggtggtttttgtgaacagaaaaaaactgtgtaggagtttctttgcctttaaaaattaatgtataatatattaaaattgcaaatcaaaatatctgctcccttattaaacctctaacgttataaacctttagtctcagtctctctctccctctctcctctcctctcctccctctccctatccactcattgttttaacaaccgcttttaagtctttgaataatattggtatcatttaaacaattaaacaccttcaagtataaaaactgcatttataaattaattatatttgattacccttttaaagtactgcactttagttacataaataacaaaatgtcccaaatattttaataattccaataaatgtttaagtatatggcatcttgagtttgtttacaagttccaatactatatatataattaataaaatttttactttaaaattacatatctaaattattcagttgtatattacttcacttaggcacactacgagtacacaaaatactgtactagaacataaaatggcaatatatctgacatcaatatgttaatgtctttggttttattctygtaaacatttctgttactctttaggtttgaaagaagcttatccatcaaaacaaaaagtaggtcatcctaagcaatttgagggatactcagccatgatattgacaggttttttttcagcattattttggaacatactgagatctagaagtaattttaatataattctataaattggaagaactcaggtaatacataatctattatgagtcgagaaactacccctacatttatatgtttgcttgaattttagatatttcgactcctaagatataaaaatgattttgctccgtttaaagacctttgaacttcatgaagacctttactttttttatatatcttcagaatgaacagagttattatgggttaagaatggcaggttaattctgaatatatctcattggacaaatacagttagaaaacagagtcacattaaatttagggctctgtgatactttctatcaggatcttagtatgagtaaagcaagcatagtatacatgactggaaaaattagtttccattttgaagggcattgtatgcgaaactgcggagtttggattttaccccatgtgacaggtttttgtgagtgtaaagcaagatgtatatggcagcaatgtgatggatcgcttagagaagcactaatgtttggcagggagctatgaagttgttgcagaagtacaagcaaaaaatggtgagtgctaggtttaagactatggaagccaggagaagtttggtatctgtgataggattttgtgacctattgattgcaaggttgagagatagagaacaaacaaaacaatatggaaatttagattttggaagatttggagcattatatcataaactgggccctctttagggagtcctcartggcctttcttcctgccattgcactggtcaacacgtttaatagttaccactacttagccatgcaacacattttatttctagtttaatgcattattattgtacaggcataaacaattatatacaaatacatgagaagtactttctatgttactttctgccttataggcttctgttgaattatgaaactgataggctataaacatgatcttaagctttggaaaatgttttctaagaaagataaatggtgaatttaatattaaataaatttccccaggatataatgcctttatctcttttttattttctgtactctttggttttcataaatcttggtttattattctgtattctcttgagtatgtggtttacatcccacttattgggtaggtgatttctattttatggcttaaatgagggaggaggatttttgttatctggttaatcctgattatgggaaacagattatgtaacagtcaaccacttttagtgatctcttaagaatcttgaagaaaatctaattttcaaagatatgagtaattattcaaatataataatattgcaatttaaactggtttctctttattgtggtttattggtctgaggataataaagtrctgtattcagtagtcaacaaatatttgactcctactacatccaaaactctgttctaggcacagaacacagaatgtacagaatacacaaaaataaacaaaaatccctaccctggggatgtggtttacattcaggtgaaggcagacagacaaataaaatttacacatatgcacatacacaaactaaatataaatatatacacacatatatgatacattatactattttgataagtgctttaaagaaaaataaagcagagaagaggaataataataaatgaggggcatgggggcacgaggggagtggagagtcacagtataactagagaaggcctcagagaaaatatacaggtatttgggaaaaattggaaggaagtgagggaaataaattacagtgatcagaggaaaatacttgacaggtataggaaacagcaaatgctaaggttctgcggtggcctaagaaaagtgtccttgagtaacgaagacaaggatggcagtatgggtgtatctgaagagggcagcaagagtgaaagtcagagaaaaaacggggagagagcagtcattgcaggaatgatgggccattttaaaatgtcgactttaagcgacatgttgaggcattggagagtttaacttgtattctttagcagaaacaaggctacaaaatgaatggaaaaactaggtcttgaacctaagtaacctaagtctctaaactttgccagtgcaattcacataatatagtgaagcaatcttagagaattggaagtttgggaaatttaggtcttcatcttgcctttgaatagttccaaagctgtatagttggctgagtattttctctgctctgagtgacctaaatatgtaatataagaagttccttcttgcttaaaattcctcattctacattctcaaaactttgaccatatatagagaaagctaggaatcatgtaaatctttttcctatagataagatttatgattatctttgtaatattacgaaataacagcaagttacaaccctctagaaaattaacagtctattctataaaagattaatgctaaaaagcaagcaaaccaaactagccccttttattcactagtcttaccataacatttgaagtttatgtatacagttaaagttgaataatagaacaaaatatattcttgtattttcattctattgytcattagtggagaaaacagaagaaaaatgagttgtatttatttctttcyttttacttttttgaacgtcacattattctttaatatgagctctggaaattgattctactgtatagagtaggccacaaagtttaaaccaatctataagggagaaaattcatgttcatttcctttaaggatctctttgctttaaaaaatcttggcagcaaaatgttaacttttgtgtaagtcttatctcaggtagtaaaaacaattaaaagtacctgccttagtccattttgggctgctatgacagaataccagagatggagtagtttataaaatacataactttatttattgtagttctagagactgggaagttcaagatcaaggagtctgcatctggtgaggttcttcttgctgcatcatcttatggaagaaaacataagagcagaagaccgtacaaaaaggggatgagataagggtcaaactcatccttttatcaggaaactactctccagataacagactaacatttgtgataatggcattaatcaatgatagcagagtcttcatgaactaattacctcttgaacatcccacctctcaatattgttgcattggggattaatattccaacacatgagcttttggggacacattcaaatcatagtactaccctgtgttaatctgttcttgtgttatttataaaggaaaacctgaggctaggtaatttataaagaaaagagttttaattggctcatggttctccaggttgtacaggcccctcacctgcttttggtgaggggctcaggaagtttaccatattggcagaaggcaaagcgtgaacaggcatgtcacaaacaagaggggaagcaagagttgagagtggaggtgccacactcttttaatcatccagctctcacatgaactcagaggaagaactcactcatactgcaaggagggcaccaagccattcaggaaggatctgcacttatgacctaaacagctcccaccaggccccatctccaacattgggaatcacagttcagcatgagatttggaaggaataaacatccaaaccatatcatacccaaagcagttaacaatcttgggcaacctcttaggtccatccacaaccacttgccctacctaatttcgcaaagcatttttgaaatttgtgttcacagtatatgagaagggaaaggatgctatcttaaatgttatgtactgtttcattttattaatgtaatcatatatgacccaatatccacagccactgatgtcaattttgatcaaagttgcttttaaaaaatacaaatgaaacttgttttctttctggaaacaaatatggatttatatataattctagctcccaaattctttccgtctctgctcaaaatgagttaccaatgcctaacatatcagaatcaccttagaatttcataaaaattacaaattcctgaatacacaacccagaaaagataacaaaatatctgagaatgaagcctaggaatgtgtatttaaaaaatgccaaatttttataaattttaagaactatcagcttggagaatgtgtaggtgcagttaatccttattgtcccaggaaattggcacactgaccctgagtagtcggggctctaggatggtacactggtgcaatgagaagaacttatatactacttctgactttcctgatttattgcctactttttcaaaatatgtaaatccccataggtggctaagcgagcactttcaggttatttggaaaactgaacagggagtttagtgaccactgaacttcactactctttcagaaaacaaatacattccagtggccttagagaattcattaacattccaaaacttatctgcgggtagtagtttacactggaggacctagctcaatctctataatattgtgtgtcatagaagtatattaatggttacactatgtagttccaagtgttaaagattttatagttaggtttcactgttcattacttttaaactaacaatcattttttcacatctagtttgattttcttttccttacaagatgacagattttctactttttcttatctttttactggcagcttcttgtctccttttattaatgtttaaatcttcaatttacagccctaatatacctatataatgatagcttgattcttttgcatctaagggtggaaatgaaaacataacaacattttttgctctttttacttcccatttctttaaatataaattgaaaatattagaagagctagatccaaccactaaagcctgtcatcacatggacacatagaggggatcaacacacattggggcacacattggagggtgcaggatgggaggagggaaaggatcaggaaaaacaaccaatgggtactaggcttaatacctcggtgatgacatagctgtrcaacaaccccctatgatacacatttacctatgtaacaaacctgcacatgtacccctgaacttaaaatagaagttaaaaataataattaaaatatataataaattaataaataaaagcacatttttcarttatgtgactacaacagaaggattatatcttcaatttccccactccaccttgtttgaagatagcatgaaatcttggagtctataaatgtacattattttgtttgcagaattataccaaattttaaatatataattatatggtgacagaatgtatacattatatagaggaaaaatataattaatttgtatgaaatatatggataacaatacagttagaataataaagaacatattttatttatttcggtacatatttagcttttcagcgagacttggttccttcaaaataaatcagtcattatatctacaacatctgggccatatagatactcaataaatattggatgaatgagtgaatgagtgagtgggtaggtgagtaagtgaataaatgctaattgcagaactggaaaaactgatacatcagtgatgttggaattttttaatttttttaaaccaaaggaagcttttggtctctcaatatctcatctgacttcatatactataccagcaatcacaggcaaagtgttataattaaaagcaacctatgttattttatatccaataggtaatacctagttttccagagagcattttgtaataaaaaatatttctcaagtaaattcatgatgacctgaatagtatttttcacatcactgcatgagtctgtgcacttaagttcctttaaagaccaactttttcatagaacattagaattcaagtttgagaaaccctatatgccctgatacttctgcttttgcaaactatgtataggtacttcttgttattttatatttctgtgtaagaaaaatagtgaatcttttctatataaacctttatcatgaaaaaggaaaaaaataaaacatgtgcattaaaaaataagaaatatcaagaagtacttgtttaaatcccatgtcttaagataatttgcctgtcctatttgacatgttagaaacaatactaaatagctgacactgtgaaattccagtgatgtttaaaacatagatgattatacacttttttctatgtgtactatttttatagaatattttatgtaagaaagggaaagtaagtataaactctcaatttgtctaaaagcaaatgaagtctttaaaaacttgtttaaaattagcaatatcataatatttcaaatgctaaaatatgaattaaaattctgtctttttaaataagcatttggagtgatacaaaagtcaagaattgatggtaatagtataattatttatactgctataggggtaagattgcataatttgtaatcatacaatttatgttgcttgaaaataaaatcctgcaccctgaatttgatctacaaagacatctttcaaaatcctgggaaagtgatttttagtctacttaaattattttgtgttaagattttaatacgctgtaagtatcaataagctgtgtagtttatttggagtgaaattataatttatgcctacatgtatcaaattttcaaataacaatacatgtcagaaaaaaactttttctgcatatagaatatgccattgattttatgtaaactatttcagtaagttgtgactgatgtaaaaatcaaacataataggattattatataaacagaaagcttatatagattataaaaatagactgagctagttgttctctgaagtcattatttgtaaatgaagatgactagaacgttgacctgacaataataaatgaaccaattgtagcctattaggaagatggattaaccagaaaatttagattaagccaataaaatctataccaatgattggctcccagtattatcaattttatttgtcccatgtccaagcttagtacttatttacaaattcatcttctatttatggactgaatctgcattctagttttaagaactgcatactccttccagggttcatatcacccttcctcacctctttgtgctttgccattaacttctcctgggagcttccttgccataacttccccaagcctcactcaccaacaaacactaatattgtcttaccaaaacacactgtatcacttaagaaccatctcaaagaccatcacctccggaaacttcaattgtgagcccctcaatggggaaaagcttttgtgtatgtgtgtgtgtgtgggggtgtgtgtgtgtgtgtgtgtgtgtgtatgttcccacattagttgtggaatttatcttaatccaaccagaattatatatatatcatcattagataagccccttccacaggactattctttgccttctgaaaaaattattttccaaattatattcttttgaatgaagttcagcattcttctgaaattaataattaggggactaatatctatatagaaaaattagaataatattatacaatcagtgttttgacttcattctagctgaagtgtttttattcttaaggtgagaaaaatgatagtattattgtgaaatcaaggtaagaaaaaatatatatgatacccagcgttatccttcaatcatagtagataactcagtaaaaattgttctccttctatttcttataacttaagtgagaaaaaaatgaaaagaaaggtaagcagatactgtagcttagccaccaagtaattgattaagttgattaccctattgggaaaaaatatcattatggagttgtaaaggcttatgaagaatgttggaaaaattgtttttctgtcatttagtttttactatttatgagagaaagtctggattagaaaggtgggaagaaggaagtatcaggccttacctgaattacttgtttatccaaggcaacagtgatagtagaagaactgggagcctcactttaggcaggtagaaagttgcagaggaaagagtttccacagtgctatcctgaggcacagtcagacaaaccctcaaaaatcagtttcaaacaaacactctgttattattatcataactctagtagtgctacagccactgagagaagagactatgtcttcggagaattttctatgacaaggagaaattcagaaaaattatactgaatttagggagtattagaagagtttaacttaatgaaaggacagttgcttcttttcatcttgcttcaaatgacattttaaaatattttcctaatctataaacatgtgacatcagcattttagccaaatggctatgttaatattttattgtttaactaggaaaggctaaattcacttgataaagagagcatgttcactatattcacttgataattgttctgatactgtattgccaattctggaggcaatacctagatgggatttctccattacacaagttccattgataccagtctgtcaatattattagcataaaagctcataatgcgttttgagtaaacagttgaaaggatgaaggcataaattaggggccactattctccctttctctaccttgctctccctaataattaaacytaaatgacttagaaatagagacatctaaccctgataaattatccccacacatcaatatttcctaaaatttatttttaagatttgtgtttctgccaataaatttttaaatatagatttgctgtcttttcaaattatattttattgggatatccttaaatgatgttaaattgttcttcatttaatgccttttacattagagacagagatacaggcatcaacagcttgaaattatcattgtttccagtaagatactgttgagatgatgcagcagttggattgatagaaatataaaaaagttccaaaataataatgtgcaatcaaaattattattaaaccatggacttgagccaaatccaaatagagcatttctattcacacaagtgtcagctgggtttctggtgcttggggtccaagacttcagaactcatatgcacttcctggggcattcatgatgctgttggtgatggacaggtggtctcctgcctctgtgtatccatcactgcccttagatggccactatcttgcaggagaaatggagtctaactgcctcaggtgctccatctgyccaaagagaaktggcttgctaataactctgagtttcctgggcttcctcacctatatactttttattgcatacattgaaaatgagactctatccttttatataagtttgcatggggctgctaaccatacattgatatgttgtatcagagtaaaaatttgtgtttctaatatttctaacatattcttgtgaaggtttaaagataccttttccattgggcttccaaaatttgtttcctgaattccctctaataattatgttttctatgcttaatttttatgttttccctgtattgtgtgaatagcagtcttgttaaagtgagaagtagtttcactctcttgaaatactaggttgattttctattctttgactgaatctttctcagtgctctaaattttttcctgcaattttctttcaagacaggtatagtatttgttttattaagtgtgaaacaacatgccttattttgccaaaaggctgtaatataataagaaaccttttggaaaattgggtaagactattttttaaatgataaattcattgtatatgtttgtcagtcataagtggttgttgatgatcctgcagtgttttgtacaaaactggtaaatttggtgccaagaagcttcataggtaggtgattaactagtagtcgttttgcttgaatgagaacataatcaaccttttaagtttctattatcatactgactatcaaataaacttctgaaagaaaaaatgatagttgaagaaaataggactaaatatttctcctgtcttttttttaagagactggattcagtgcaaaagcaaacaaatagctacttattacatcataaagctgtttattggaatgcattagggcatgtggcaaatccagaccttatcgggatgccgtagggagaactccttaaaggatgctggctgcctggcttttcccattgtataatagttaattaggtttcctccagttcaggcatacacacatattggtactggtagggattttctattttgataatttaaaataataaaaatggctttgtttctataatgaaaacatatacatatgtaggttgtttatatgcaaatatacaatgaatataagttgtaatattgatttaaaattcctcttagcgacacagactaagcagtcacccttagtctgtgttgctaaggcctattttcttctgtgtgccccacagttagtgttggtatgtccgcttcttgttcccaggccattattgttatttgtgggtacgtacatataacctacattgatgctgaaatatttaaaaggtcttacaaaatgttcgtatgttaaaacaactaacaataagggaaaaaaattggagtaaagaagtccataagataagaaaaatataaaactaggattatggtttgacatcactctttctggcagccaagatagagttcagacagttacatgatttccagtgtatattaaagtgcttagagacacaattattcctggaactgagagaaatgtgtttccttttgtcttcataaagaatataccatgtaagccactgaatcacttacaggtttaaaatctggcaaaactgcccggtagttcataaaaatgacaatctctttacagtatgttaaaaataaatttcatgttcaagttcctcaatgtagctaaaggactgatactaatgttcggtttagtaggagcaattctgtgccatgtgattgcttatgagtgcgtgtttatgagtgtgtttggggtagaaagaggtgttcggatagagctggggttttaggagatgattctgatttttaacagagatttctctggaaaaattagaaaaaattttaaaaaattagaaacttcatgatatctagaggtcactaaaatctcaacctttgcttatacctatgtttatatttcatctttaatgtcaggtgatgacatcaagtgatttatttttcatttttcttttttgtacttttggctttgttcttatatttctttaacactttagtaagagtcatctatgcatgcatttttatatttattctctcttgaacacacctacacaaaaagttacataaatgagattaaatattatgtgtttttatctggtagtatttgtggttttgttgttcttctttcttttttcttttttcatcccatcagcatcccttctcttattcttggcttctatcttggtcattttttgtccacagtaacattttcaaataatattctgtgttttgcaattctgaatactctgaacacagggtaagatgcttcatttatatcttaccatcaaagggttcaaaagcatacaagttactttttttttttttttttttttttgaaatggagtcttgctctgtcgcccaagctggagtgcagtggcgcgatctccgctcactgcaagctccgcctcccgggttcacgccattctcctgcctcaacctcctgagtagctgggactacaggcgcccaccaccaagcccagctaattttttgtatttttagtagatacggggtttcaccgtgttagccaggatggtctcgatatcctggcctcgtgatccgcccaccaaatccaaagtgctggggttataggcgtaagccaccgtgcccggccggcatacaagtaatttttaaaatattttatatatatgtagctacaacctctagagcattacatcatttcatctttctcattccctatttgatcttatgtcaaaaagcatcaggccagaggataggctttagggtcaagggacaaggttgcaattttgattttgccatgtaataggggtttagtttagtttgggcaagttatttagcattactaaactataattcataatatgaggaaagcagtaggactttctacttggttttgttagaattaagtggtcatcacagtgtctgacgtatagtaaacactatatattaatccaattacaattttccaaaactaggttcaaaaagtgaattaattaaaaaatacataattgtgtggcaactaagataaactactagtgggctttttaacactgataaagatcacttggctttccagatgctttaaataggttaaaactgagaagcatgtaaatccaagtatatacttattttgttagtgtgacaaactcatagattttgtatatcctctcttcaacataccctgcctcaagatggcctttgtaaatttgtttatgtgtgtgcacgtgttttcttttttcttttttcttttttaattgacaaaaattgtatatatttattatgtaaacatgatgttttgaaatatatatatgtcatggaatggctgcatcaaattaattagcatatgcattaccacacatagttgtcatttttgtgatgagaacacttcaaatctactttattggcatttttcaagaatacaatatattgttattaattattatgtaaagttttattgttactcataagatggttgaaatggggccaagagagcaccatgtgatatgatggtgataagtcacttattccacaagatgctgctcagaaattgtttttgctcttggtgattaaggacttgtgattttacatactcagaggacaaatttgaatgaaacttatgttgtacaattcatctggtgtttgctgtagtaaaaatttgtagaggaatagctgcagtccttctccccatatcttctggcataaatataaggggctggggtactgtcttccccatagtcctcagccctgtgtcttgcacattatctatgctctactgaggaggtactatgtgctcagcatgctgcttgacactgtggaccatttaaataccaggagaaatttagaggtttggtaatagaaaaagatacaggctatgaacagaactaagaagtaaggggtcacagaaggtaaagtcttccttctgttattgagggaaaacatagctattcttttaggcccttttctttcccaggtagaaactctgaagttacaacaaagctggggacaatttttgaactcatataaatttgtgccagcaactaaatgagttttgctgttcaaacaaaaaatgccagtcactccattcttgccaccaaactgtacatagtgagaggttttaaagacttaagttataaattttaaaaatagtggtttttatcttaaaattatgttggcctttctgagatttaaaactgccacattgttaagaaagagaccattactgaaacataaagtttggcttgcaagttcacaagtcctttctctgcttcctttcctccttaatataggtcccctgagctacattggaaggtgtaatcttctctcttagaactgtataaatacagtaagccccagtaaaaacagacggttggtgtgatcatttttaacagccccggagatgtccatatgctattcagtaatgtggcatctgcatagccctttagctgtggagtgtactttaaacataagcaatttttaagcaacaaggtgtcaaactattcatccatgtgaagcaaatcagtcctgctgcacccctgagtacaatcagtgaaaacccttagagtgctcttaaccacccatcctccccaggtgcacggcatgttcttttaatacagttacattattgtgcctccaagtcagaaaaaaaattgtgaggtaaaatattcattcaattaacactggagtcactaagtcactactgtgctggtgttctccaccagtcacaggagcatttatgtggctggacagctatctacatccgctcccatacagttatacgctgctgagtctaatcgaggcacattcaatactaataagtaaaaataaactttatggaataagagaaatttaacgaagttaattataaaaatgttcaagacaaaaataagtgaattaaaggcaaaataagtgaattctttagtcttgaatatctaactgaaacaaagtgttacagtgttgttctaagacctctcttttttaatcctcctccatccttagacctttaacatcaagcagactaaaaagagatctaataggtagtcatatatcccgaaagacacattattgaaaaaaaaaaatgcctacaaagtagttgttgccaaaataatttgcgggaaatcaacccaataagcaacactacaaaaataagataaaaaatggctagcctctcaaggtgtttttggctgtgttattaaatgttcttttatttgttcatattggcttatggatccacccaatcataagccaaagctcactcagtcatccattcattcatgtactatttattgcgtgcctactatgtgccaggcactgtactagaccccaaatgatatggcagtgaacaaaaaatgcttggtattaaggaacttatattctagtggtaggagacagaaactaagtgaacacataacatatcatgtactgatcacagacggcgattatgctgtggggagaagtaaagcagggacaatggatagtgaatagatgaagggaaagtcattataattttgactagaattaacatggatgacattgttgatgaggtgatactggagcatatgactgagataaaagtaaaggaacaagctatgtgggactaggacatgggtgaagygagcagaggagggatcaataaattccaaatccttgcattttccttgtttgctccacaaaaaacgaaaagatgagtgtggttgtgtctcagggaggcagaaaaagagtggcaggagttgaaatcagcagtggaggtgatccatatcaggctagtcattgaaggaactttggcttttactctaaatcaagaagcttccagatggtttggagcagaagaatgttgtaattttatttatgttttacaaggattgctaactagcctatggagaataaatgatgcatttgtatgtgtgtatgtgagagagagagagtgtgtgtgtgtgtacacacacatggcagcaaggacagaagaaaaaacatctaggatattaatgcaataagtaaaatattatggcactttgttttttgattctgtttgctggtttgtgacagagtctcactctgttgcccaggctggagtgcagtggtgtgatctcggctcactgtaacctccacctctcaggttcaaacaattctcctgcctcagcctcccgagtagctgggattacaggcacgtaccaccatgcccaggtaaatttttgtattttcagtacagatggagttttgccatgttggccaggctggtctcgaactcctgacctcaggtgatcggcccgcctcagcctctctaagtgctgggattacaggcatgagccaccgtgcccagttcgtactttggaacagggtaggagaaagtgtccctgtttgtgataactttcaaaaatagagttcctttatttgttaatttatcggatagggtgtgaaataaagggagaagtaaagtatggtttcaagatcctggcctgagcaacaggaaggacaggtgtcctttactaagaaagggaagactgaagaagatgagaaatccagatttagacagaaatctaaagatattaaatcttatgttaaaatgcctagtaaaagcctaaggtggagatgcaggcaactgggtgaataaaatgaaagtttagggaagggatccaggctggagattaaaaataaattcaaagggatcagcacatggggaagatttaaaataaatcatggagtgagtgaaatcgagaaaaacgaggtccaaatgtggagtcytggattttccaacattaagaggtaagaaatatgaagataaaagagtacaggagactgaaaagaaacagctgttcaaataggagtaaagccaggaaagtgtgatatcctcaatgccaaatgtatcaatcggggttcaaccagagaaacagaagtagtagtaaatgtatattaagatatttatgcagagaattggcttatcagattaggcaaatctgaaatctgcagggcaggctgtcaagaatggcaggctggaatttttggggatgagtgaaggatacagtccacaagtggaattatatctcctcttcctcctcctcctcctcctctccccgctcctcctcctcctcctcttcatccttctcatttttcttcttcagacattctcagttttgatattaaggctgttcaactgattgaatcagacccatccagatgatcttggataaagtctctcttttaatgtcaattatttataggctttaatgacattttcacaaaaacactgagattggcattttattggataactgggactatatcctagttgatacataaaactgaccatcacaccaactaaaggataaatggagggaatgatcaaccacgtcagatagcatagccttgagtatgttggatttagctgctaattcatttgtgaatttgactacagcagatttttattttggaatagagctgtatttgtttcctatggctgtcctaataaattaccacaaaaataggtagcttgaaatagcagawatgtatgctttcacagttctggaggccagaagtttaatactggggtttcactaggttgagataatggtgttggcaggccatagtccgtccagggcctctaacctgcctcttccagtttattgtggctgccatgcatttgttggtggccactcaaattcaatctgtacctttattttcacattgctcctcttttcttgtgtatatcaaatctcatctacckccctctaataaggaaatgtgattggatttacggatccccccctcccaccccacagataatccaaaataatctcccatgtcaagatccttaatttaatcccatctgtagagacccattttccttgaaagataacttatggttccacatggtatctctaggtggctatctttcagcctactacaagaagcaaagcctaactgaagtggatccaggaaaggtacctatttcagaatgtttctgtaaaggtgagcaaagaaagagagcagcagctgaggcaagggtgggaactgtatctcccagtcaaactcacagaacttccttcttttacatgcaaacatccaacaaacaaacatatatgattacagtttcatatatttcactctctggccatgtatatctattcatttctgttacatgtttaaccaaaccacttatggtaggttaatttgattattttgcattgaaaaagaaacttgaatgaatctgaccagcaagagatagtttcctgagtctaaatactttttgacaattttgttattttgtttttacctttgtctacaagggtaagtcgttgttctcaaaaatcacagtgaataaattttcaaagcattgcatacatttgtccagtttgacttacaagtcaaatctcttatatctgaatgtgattccccctatattgtattccaaaactttgaattactttactattacattctttaaaaacatatattggtattgtcaattaaaaaaccaattcccatgtgcttgtctctttatttgctttccaaatcatttaagccctggtcatatctatggcatacattataaaaagatcagagggaaaagagagatgatagaaaaaagtcttacttttttgtcctgtaatccatgacaaggtcaaggaaacttattctgaattcccatttctattacgcatgggctgtctgacatagtaggcatcaagagcagtacgtgatacatgtgtaggtgctcaataaatattgatgaatgaataagtaaatgaacaataaaattaccgataagaccttttatgttatgtttattattctatcgccattaaaggcatttataagcatcataatttttaactggcatatatatatgaaaatgtatccttttatatgaaaaaagagtaattactcataggattgatatagtgtagcagcttaaaagagaatatttcttttgaggaaagcatatggtcaaagatcttgtctgacagcatttggctgcacagtgaaattcgggctctrcaatgagacatgctcaatgtagtgatccctaatctgggcttttttagatttataatcttgaagtaattattttatctatctactcatctggaaaactgggctatctattccatatgattttgttaattaataatggtattgcatataaagggcctaatgttgtgccagctacatagtattggctaatatcatgatcatgatcacaggcaaatatcttttcttcaggtttgatagtacaacttgtctttttaactttttatacataaatattattctctttcacytgaccaatyttctgtacaaaatttatttaagarccccttaaaattcacttaggaaatcagatggagcatacataggaagtatataacacaatattatcagattctgttcactttcttttgctttttttctatactgtaccatgtgcagataatcaattgttatttaagtcctagactttggctctggaatccagatccccttatctaattaccttcttgggtttaccacatggatactttaaaagcagtatgtttaataatgcttttaggatatttccaccccatctttgcccaaatatggtccttgttagtcttccctgttcagcaaacaccatcatcatccatctaactgggcaaaccatgaatctagcagttgttcttgatgtctccttcttcctcagtctctgtcttagttagttcaagctattataacaaagtgccataggctgaatggcttataaacaacagaaatttatttctcacagttctgaaggctgaagtctaagatcaggaggccagtgtggtcaggttctggtgagggtccactttcaggttacagaccgccaactcctggctgttccctcaaatgccacaaagagcactagcaagctctctatggtcccttttaaaagaggctaatttcattcatgagggcttcacctaaatcaccttgacctaatttacctcccaaagacccttttagcacaatcacattggtgggtaggatttcagcatatgaattttgggtggatacaaacattcattacataacaccctccatgtccaacttctcacaaagatattctctctaaataagccatcctcagaatttactccaacccttcttcaaatttcagcttaatcaccatttcttgaggaagcctccccttactgttcctcctccctgtctccagtgcagatcttcctgacatatcttcttaattccatgtacctttgctttgcagcaattacagaggtaactttcacattaacttttgaaatgatttgatttatgtttatctaagattctttgaagatacatggcatctgcttttgctcatcattttatcttcagaagctagggtttttcaaaatgtcagttgggactcattagtgagtaatgaaatgagattaatgggtaatatgcagtattttttcttaatgaaataggctaaaataaaataaacttttgtcaaagagaaaaaatgtagttatgatagaaaaataaaggcagccaataaagaatttgttttcaaacaagtcactgctataaggaattggaatgtaatcctacagggaactctggaaggcagcatagaattcatttaggttctgtacctgacaactttcaatcagtcgtgggctattcccagaacctttaattctcaggcactcgtagcccactatgcattcaggtagttcaggccctgaggaaaatagatacagatactatttgtatctacatataaatgcagtagaaaggcaaggcctgaggaagttacagtaagggcaagaagtagggaggagacttaaccacaaactggctgttttaggtttcactttatgaattcaatttaaatgagtatgtaagcgcattttgctgtttgaaacggggaaaaaaaagtcttagttgagtgatctccgtttaattatctttctctgataagaattgaatctgaacaatgagaacacatggacacaggaaggggaacatcacacactggggcctgttgtggggtggggggaggggggagggatagcattaagagatatacctaatgttaaatgatgagttgatgggtgcggcacaccaacatggcacatgtatacatatgtaacaaacctgtacgttgtccacatgtaccctagaacttaaagtataataaaaatatatatataaaaaaaggattaaatctggatttctttaaccttctcctcttgcaatctgtatttttaaatcattgaattattttcaaggtatttaattattttattcctttgtattgtgccttctgtaagagtcccagatatttaaggcataagaatacaagtatgcttcatgcatacacataatattagaagataactgcaaatttcccttgttatctacagcagattgtttctaggacctctgcaaatacccaaatctgcagatgcccaagtcccttatttaagatgaagtagtatttgcatataacctacatgcattctcgtgtacactttaaatcatctctaaattatgtaaatagttgctatacagtatttgttctttatttgtattatatttctctttctcttccttttgtgtgtgtgtgatggggtctccttatgttgcccagactggtctcaaactcctgggttaagtgatcatctctcagcctcctgagtttgctgggattacaggcaggtactcccatgcctggcatatttttcattgttgtgttgcacatatatatttgaaatctttttgatccatagttattgaatctgcagatatggaacctgtgaatatattagggctgaccccatcaagggtcaagatataataaaattaataatgttcactatttcttcaaggacattcttaagtgaacttagcttttattttctttcatactagcagtgttaagtagtgaagaatgcagtgtccaccagtaaagtctgtgcccagccttgatctgtgttgaggtacagcacttttacccatgtcagcttttgctccatcagtacaaatatcaacatagtgaaggcaaatatatcttactattattaggaaaaatatttggccttgaagaactccaaaaagtcttggggtgacactttgtggactattggcccataatactgtagcaggacgagccgcagacaaaacctctcagacaccgagttgtagacggtagggctttattcagctgggagcattggcaagctactgccttaaaatccgagctccccaaatgcacaatttgtgccccttttaagggctcacaacactaaagatttcacatgaaagtgttgtgattgatttgagcaagcaggcagtacgtgacaggggctgcatgcaccggtggtcagagagaaacagaacagggcagggagtttcacagtgttcttctacacaatgtctggaatctatgaataacatcagtttctaagttatgagttgatttttaactactgggtttaggccaggcaggcccaggcctgttttcgggcctgacaccgggctgcctgtctttggttttactgccttgttgttttttcttaaaacaggtactgagtataaaacaatataaaacaatatgagaaggtctctctcttccctcaatacacaaattttctaaacatatatatgaagcattttataataggaaacaaacgttatcattttaagaagatattaaatgtttaattgtaaactgtctttacttcccaaataagctctttttgacataccatttatcaatttatctaaactagtctttaaaaagtgtttatatatttaacctataattatgtggggagtaacaagctccacactgtgggacttcctaaattaaaaagtagttattttctcatattttttactttcaagtttaaactgggattcgttaaaagttaacatgaagaacaacatattatgaattagtaaagagactaaaagcattatgtagttttaaacatctcttgccttttggaatcatttctacactaaagaaaacagatgttaatgatgataatatcaaaaaaacagaaatggtgatcatcatcatattaggcttgttttaaaacagtaactgtttaatttgaagattccattttgtggtttatcaaagtaccacacaagttatttttatgcttagttacataatcctacgtattgtgggtcagtgcttacgatatcagcaaagttatttaatatatttacaatgtctcacattatccacctatttattattgaattagagtgattacagccacttcattttgttttgttgttgttttgaaatgtgttctgataaaaggaggttcattttgatcgtcaaccagaaaacaaaacatgataaaataaaaataaaactcaggaaattcgacaaatttcttgagagccrcctacataaggcattttgtaagaagctatgaagtatacaaagatgtcgctaagtaacctgtaatctagtaaagataattacactgtagtgtataagaggaactatgaaacacaccaataaaatcttatgagagctcagagaagggaaaaattactttcaaagaagaaaaaatatgtattttcccttaaatgataaaatttgttcttatgtttttgctttcaaccattctttaaccatcagattttttcaattctcttatcttcgcattattaaacattttatacatgctgttcaaagtattattatcaagtacagtacaggcttctaaaaatatgctaaagccagatgtaaacagttgaaacagttgcaatactgtcttctctataggaaataaatataggtaatcagtgaataaagctagaattttaaaccgtttacttggaataaactgtggctgaaagccccatgggcygcatgaatacagcagccaggggtcttcagaaggtcctgtatgccagttatgccccatcactaacaggcagagtaactctcactgagcaatgcgaacataatattcatgttttccacttataatgtttaatttgtgtaatacacatacatatgtacgcacaactgaaaaatttggaattacaggtaaacttcattttcaagtaatttgaccattcatatacattcatcttctgtacacttgcaaaggtaagtataaaaacctaattttctgtggcagtttcataggctactttattgaaagtggctattatgcctgtttcctattttatgctcatttcctaataaaaccaacaatatatccaactacacagtattttaaagagagactaattataatgattactattgtaagaaagtgattctacatgaatatttccatgtttctgtagagcctgggcttttttagcaaaagctgatgaaacttggttaaagaatgtatattagtccatttctcacattgctgtataaacaactacctgagactgggtaattttaaagaaaagaggtttaattcactcacagttctgcaggctgtacaggaagcatggctggggaggcctcaggacacttacatcatggagggaggcaaaggagaggcaggcatgtcttacgtgaccagagaaggaggaagaggaaacagggggaggtgttacacacttttaaacaaccagatcttgtgagaactcacccactatcatgagaacagcaagggagaaatccacccctatgatccaatcacctccctccaggcacctcctctaacactggggattacaattcgacatgagatttgggcagggacataaatccaaaccatatcagaatgactgaatatcaaaatatgtcctagaagctacaaacggagcattgttccagagagatttacaaatatatcttccccagagccattcatttatattccagtgtgatagagagagaacttcccctccaatttccagagaattgtttacattctagagtagggtccttgtcattcttggggtaggatgggctgatatgccactgtccttcgtgggcttcaagtctcattctcctgtttaacaccactactagcattgagtaatatcaggctctcatcacatcaccttgtggtgatcagggcgcaggagccaatgctaaggtgctgtgtgaataataaatgctctgttctctgattcatagactcatgtttcctgtcagggtatctgtctgcctctgtgtgtttttttgtttatgtatccatacacctatccatctatctggttagccagcaatccattctaccatccatccatccatccatctaaacttaccaactatgacttacagaactggtttagattactcatacatcttatgagtttcttctcttcttagctttatcaaacaacactcaagctatgacaattgaaatggtattaccatttcataaaacaaatattgctttttaatttttacaaattttatctgaggattttaaaaataatacttctctgagtatactaattgaattatatttttcttttctcattgcttatattgcattctcattcaccaacctcagaattattattaaatattgcaaagcaaatattttaaaaagtactttaaaggaaatttttaaaaatatatattaatacttacactgatccacttagaagaaatacatatcaattacactgatccacttagaagaaaacctgtgtacttaactttattttcgtaaaatctgaaatttaatttaaaatcgagaactattttttaaattaagacaatactttggaaataatattttaaatatatatatatatatatataagagaacccactgttatctatgttacattaacctggaatttactatatcaaggaaattgtagaaaaagaatgcagtggagagagagttaaaacactagtcaaacagacaagacaacaccacaaatataggatttttactagaggtgcttttttccccccttaggaaaagtatggcttctctttgggaaaattgagattggtcacacttcagagcctttgataagtactttgatgttcaataagaatgaaaaaaacaatgttgcttttgcaaagagaatcaagaaaataataccagtttcagcaaaagaacattgttttgtgtactttaacacacactacaaggaatgtaaagaggccctttttattaaactggggaaaacattttttgcttaaaaacaaataggacaccagtagaaaaaaaaattaaactaaaacaaaacagcatgcttattgctttgtgtgtaataggtagcaaatatttttttaattgaatagaaggagtgcaacaaataaaaagctacatagaggataccattttactggaaggccaaatcgtgtccttctagtaaaaatgtatagttaacagagagtgcaatttgatgtgtgaataaatgaattattttgcaagaagagatattttgctaaatttgaacaatgacatccaagaaatgagatttctttgttgttctgctgggtttttcttttaatgtaattttgacaattttgattaaatgtccaaattcataatgtgataaattattgtggatgcaaaaatgttagtaaaatatttttaagagttttaatgaacctggtagatttagacagtaatagagttctgtgactccccaaaatgaggggacttgcctcttgatatcagggaggaaatcatggggcaaagctcatagaaatgacagctgtagctaagagcacctttctcctctaaagctgactgcagaacaaaaggttaaatgtagttgtcaagtttatagacagggaaatacttgtagtaaagtgaaagtaaacaagcatttaaaaagcttcaaagagagtcaaatccacaattcggggtgatttggatgaatttctctaatatgctaatctgcatggactaagtccatgggttagaggaaagataagctgaatttagggtgaaggggataggaacctctggacaaagggacaactttggctgatgatgcttagggtagagtaaggatagttttaggaggttctttcaatattgagagaggtttaattgaagaatatgcaaaccaaactagtgagattatgaaaaagagttcctagaaatagcacaattgtttgggtagggaaatattggacagaaaaagaatatggaaacaatgcaagaatcgttggaatttagagtgcaaataaaaagaataatctgaggaccaagtaaaggctggttaaaccaagtcaatggaacaggagcagccagcataatttcttattaaatagtttggatggtgtatcaggcctttattgcctcttgcctggattattttaacaattttcccatgaagttgtctgccttggacataatacatctctgatctatatccattagactacttccagagtcaaaagtctataaatcacaagttaacgatctatgtgattcaatggccaaatcctcacgcttccccatctgaaattaattcccataggactctacttggatttctatttccataactaaattacctcaacatacacttgttacctgattatatacatgtctgcagcatgaagttggaaactttgttaacgttacgatttttcttttcaatgtttttttctttttcttagtttgccaaactaaagcacagcagaacaacaacaaaatgttctttccctgaaacagagagagcccaggctaagccagagataacaaggagttgagactaccaaaagaatgctgacttctaaaggttgggctaagagaagagcttttatgtttaggtagaaacaggatgctgattttaaaaaaacttcttcattcattaaacattttccagatgtgagattgctcatttcattcgtctcagaagcttattaaattcccctacactatgttggaaattgattttcacttctggaatacagtgatctggaggcagagatgtgacatgggagaggaagggaaggtggaagaaaattagatattttcctaaagtgctattagcaagaaaaggtaaccaaagaatgagattaaacaaagcctttctggagaagatgacttgtgttggtggtaggggtattgagatgaaagaaagataggaataccttcagcagactgataattgtatacactttgaagtgtattttaaaaatagctgttccacgtttaatagatggggattatttactgttattaaaaataatatagagaagcagattaattgatgcatttatgtttattgagttgatagaaccaatattatggaaacaaactggcaaaacttttcttcccttttgggcgttcttgttctttcttgcattcttttgtgattgtttycaaaccaatgacttcttggtaactataataaaggtttatattttacttgatmaaatgtaaatttaaatagtgttttttagaaataacctactgtggggccaggcgcggtggctcacgcctgtaatcccaacactttgggaagccgaggtgggcagattacgaggttaggagtttaagaccagcctggccaacatgatgaaagcccgtctctactaaaaatacaaaaattagctgggcatggtggtgtgtgcctgtaatcccagctacttgggaggctggggcaggagaattgcttgaatggggacccgggaggtagatgttgcagtgagccgagacagcgccactacactccagcctgggctacagagcgagactccgtctcagaaagaaaaaaataaaaaaaaaaaaaataagaggaaaaggaaaaaaagaaataacctattgtggtattgtggtatttttcagactcagaatttcagtccaggaaagggaataatactaatgagtgacattaaatgctcttttttaatctggaaaataagcagcaaatggctttagcttctaaattttctcgtcattttttttttcctttcttaccagtttgacctaaacaatcttagaatgtatagtagctcacagctcttcacagctttgtttatttttaaattttttttagtaatccctctttgaactgacttttacctttcattgtctatgattcttcccagactcctccatgcagggatcttgatgcagattcttccatcagtacctccagatattaacctgagaatggaaaatattttgcaaataataattttaattctccctcctctcaaaaggaacatagtttacccgaaatataacttaaatttaatgataataattaactttccaaattgccaataattccattccaaatatttcataacttattattaacccaaaccattttctctatactcttatttccctaaagtgtacacaataatcagcattcacaaggaaaggggtaaactgtttgactttactaccacttttaattctagctgcatttttattttttcgagatagttttacaaacacaaatacatacctattgtattaatttctttctgatttttttttttaaaaacttttattaccagaggcctgttcatattagacatcaggtctgtgaagtagatatcaattcaacatagggatctatgtactgccaatgaataattgatccatgaagaggcaaaatcttcctaaatttcacagcttactatcagagaaaataatgtaaatagccataataacaaaaatggactttctaccctcagtgctcctatgattggagggaattcagttgctctgcataccccctttccttcctttagaaagaagatctggccggaagtgatggttcagtgtcgagtcctttgacaaagaccatcttaacttatttttattgtttcacctaagctgtgttttgtggtttcgaaagtrtctagcatgacctgtgaatctattacagttcaaaatcaattctrttcctgtttccatagttcacattcatttccgtgagtattagggtcttcataaaacagcagttttttctgagtgttgatcctagctgattgaacgtcttcaagaacaagccactgatccttgttacacaaattgtaaactcagtcgaagtgagcttcggctgcaggttcaacactgcttacttaatgaaagcaaggaaaagtctcttttttccacatgttagtaaagggtttcaacaggctaaaaaaaatattgaataactctacataatggagaaaggcagtaataagaaaggaaaaacagaaaaatagaataagtagtctgtgaatcctttggagaatttactgaaaactagaatttcttacaatgtacacaaaatggctgtcaccaatgcaataagactttttccaaaaattgttctcacaactctaagcaactgaagtgttgcttccttcatcacatcatgtaatgaagtcaacagagtataaaatattccttgtgaaggaaaacttgatatcactataactttaagaaatattttgagggtgggtgtaagtttgtatctgaaataaataagtggttactaagctacaaacagatttttagccaacagccacactatctaaaatgttcaactctcctccatacatagacacctcctctccccttctctgctttattttcttttacttttacatactaaatattttatctagcagtaagtgtatataatacattatatatttatcatgttggtttcctgaatctcacatcagactgcaagctccttgaaggcaaatatgtattcctttaggttcactgttgtttcctcacctcctaaaataggacctggcatataattgtgctcaatcattttttcaagaattaatgaatgaggcagggtgcggtggctcacacctgtaatcccaacactttgggaggccaaagcaggtggatcacttgaggctaagagttccagaccagcttagccaacatggcgaaaccctgtctctgttaaaattacaaaaattagccaggcatggtcagcatgcctgtagacccagctactcaggaggctgagacacgagaattgcttgaacccgagaggtagaggttgcagtggctgagccaagacagagccactgcactccagccttggtgacagagcaagaccttgtctcaaaaaataataataataataataataaataaaaaagaagaagaattaatgaatgaaactggagagtctgctgcaaagagaatcctgaggttttatacttctcttccaaagaataaaagctgtctatcaattctagaataaagcactagcttttgaaatgagtaaagggatcaagaaaatctagtgctacctactggcagctttcccaatggtgggagtagcagttttaaagattcaataaacaatctccttgacataaaattcaacaatggcaaagttaagtgcaggaagagggcatgagacctattccccttatgaggaagagaatttattattaaaattatgtacaattattgtggtgtaatgataatgataaaattgatgggctttgctttattaattgtttatacatattgtgcagggtgtatatatgcttactgccttgtgtaggtggggtgggacacagctctccactgatacctcttcttctggctcccctgatattccactagaagggggtaatgagagattttgatacaacaagcattatcagttttatcttgtttgtttattccacagatatttactagacatgcaaagcaatactatttagtagatgcaaaaatagataagtaaagacctataagtttttggtttccaaagtcaaatgtttttatggtttattaawattgagaacactgagccgggcacagtggctcactcctgtaatcccagcactttgggaggtggaggcaggcagatcacttgaggtcaggagtttgaggccagcttggccaacatggtaaaactctgtctctactaaaaacaaacacacacacaaaaagttaaccaggtttggtggcgcactcctgtagtcccagctacttgggaggctgaggcaggagaatcgcttgaacccgggagatggaggttgcagtgaactaagattgtgccactgcactccagcctgggcgcagaacgagactccatctcaaaaataaaataaaataaaataaaattgagaacacagaaagatgagcaggtttgtgtggaaaatccttaaatctgtttgacaaattgagttgaaagtgttgaattccccagattacaaaagaacaacctgttaataaagcaatgctaaatgtattggaacctaattgcattcagaaactactggaaagagttttattgtctcaaaaagggaaagtcagaaatgagattttattaaattttggggtctgggatccaggagtttaaggtggatttttcaaggcagactttttcaggtgagcagactgttgtctctaaattgatctgcaagaatttcctgaagcaaacagtagagttatttataggattacagtcttatcttttctgtgtataggtttactggaacaaacaagacaactgtggtcccagttctcagaggtagcttttgagacctccacatgcacatgttgaataaacaattggaactcagagggttagtataaaatttaggagtaatcactatatagattatcataaagatctggagatggttctgttcaagattgccaagggatggaactgaattcctgtayggctgctccccacttgaaaagccagacacaagaatcaagagttggtgggaagaaagaggtttattgaagtgctagcagctgaagagacagctggagtcaggtctcaaaaagccatctcaaattctcaggctggctaatggggtttgaagaggaaggcggcatggaaactatgtgcaggagtgatgtaggttgcaggtctgcttgtcattttccagtggctgtcttgaataatgaaccmtctggaggccttggtgtcaacttgcttaggtcagggtatggattaactgtgcaccaatttcttctcagaagggagaaaactttaactgccatctccactttacgcctgagttgctttaagattagcctttggaattctcaagcaaacacgtagttagatatatgtatagcaagaaaaaaaatgaggsagggattactttttaaagcaagctagcaaattggctgtactggttactgggagagagcatcaatgagaaaagaaatagattagcacwgagtattgagaaacctmmacatttaacaggttattgttggcagacgagcattcagtggagattgtaaagtggttagaaatgtatgaggatgaacaggagagggtaaggagggtacttcaagaagcaaagagtgatcaacaaggccaaatgatgctttgtgttaaaatcatatgaggactttgaaatattcatttagtaacttcaaggtcattattaatcttagcgtgagcggttttggtgatgttattgaggcaaaaaacagagaaggttgaaaagtagtgaatggataaaaaatgaaggtagttcaataatttgggatgagaaagagaagaaaaagataaattcataatgtagaaatgtgagaagtaaaatttttaggcaggagagatttgaatatatgtatattctctgcttccattatcactccataattttataagaaaaaggtaaatacaccctttcatcctctgtgatttcttccttccttccttgtgtctattgattctttcatttactataatcagcaaacagcaggcacagaccatggccctaaggaacttayagaagttaactcatagaaggccaatatgttgggaaaaatgtgaataagtatataaatatcctatcattgcataattagtatgaatgcagattaagtttgagtttttctgtaatactccaaggcgaagagttacgctgccttctaatgcaagtatttggctgaaaattggattgtgttttgaagtctctgtactaaatttcctccagacatagctggcatatacagggacaaaaacttttgacctggagctcattagtgcaatgaagcattcaagtgaactagcaggtrcaagcctgaaacaaacaaacaaaagaaaaacatcaattgtttgattaattgtaaatgcggaagttgagggtagggaagtaaaatttcaacccatcaaggaagtagtcactttaaaattcacctgaaatgactatttcaaaacctgcttccatttcaatgctaaaaatatttcttttccccaaaccccttaaacggaaggagttataagtgaactagaatacacataggaagtcatgctgcattctcatgttgctaattggaattttgatgaatataayataaaagcaaaacaagagcaaagtgtttccattagttcactacccatgtttctgcaycttaatcagagcgttgttaatatttaaatatgcgtttgaagccccaagtgtatagggaggcatggaagtttcattaataactataatttatataaaagaatatatgccaaagacaaatgctcaaatatggagtttcataggaatttttcaaacgtattttatagctcagacatggaaaaagaaattgcagcaggatatgaacttatgcttagctactaagatacactatggcttatcatttattgagaaaagtccagatttttgtcttaaagttatatttctccatcagttatataccacttttttttttcacataaggctgtttggaaacaggcaaataggaaaaaaatctgcaggaaaaagggacattgacataatctgaaatgccttgtattctgcagatttcagaactatacagctttcaaaagggacataagggagcagagagaactgccactctagagctgtgactcttttctccttcagtagtcatgctttcaaatgggtccttctgcagaggaatgacttgaagtaacaatcaccattccctcttcacagcagtctgccacagaacaaaacttcctggaataatgccagttgaaatgactaagtgtgtcttttctatacatccacaaggatacttacctagtgccttctgggttctaaaggagaggatatagttcattgttaacaacagctctaagtctctcttactatgtgaaacttactcttttattaaccagaggaaaggaatcagagacttccaacacattacaattatattcaaacatacttccattcttaggatgagctctgactcaaatattgttttatgctaagtactagtatggagtatgccttcaacattaaattcactgtgaagaaacatttttaaagtaatatgataatcagttatgagatgccactagatatcctcaaagctattatgcaaagagcgagaggaaactttaaagcaaaaacagattaagttcttgcagttttcataagggggttggtttagaattcctacagtcaaataagctgtgactgtaatggttctttgagttgatgcacagattgtgcaaaatcagccctacacataagcagctagcatgtgtaaaaagtctacctgactcaaaatatgagtcccactaggctatcacacagtattatatcttggaactattgtataagaatgaagacattggccaggcacaatggctcacgcctgtaatcccagcaatttgggaggccaaggcgggcggatcacctgaggtcagaagttcaagacaagcctggccaacatagtgaaaccccatccctactaaaaatacaaaaattagccaggcatgatggcaygtgcctgtagtcccagctactcaggaggctgaggcaggataattgctagaacctgggaggtggaggttgcagtgagccaagatcgtacaccgcattccagcctgggtgacatcgtgagagtctgtctcaaaaaaaaaaaaaaaaaaaaaaaaaagaagaagaagaagaatgaaaaaaacacattcttccaatgtcctacaagacccaacatcataagtactctctgctccctttcacaatgaatttcctacacattgtattccattcctggatcactctactgcaggtagaagctactttgctgttcactggaacattctctttacaatttcatctaaagacctttgcctgaaatgttctcccaggcaaaatagcctggctaactctgttagctctttcgttgtttccttgaagtttatcttmttaataagcctgccccgattgtattattgaatagtacaactacccctctcctcctttattttttcttttcctttcatgcaattttattgagatataattgccaaataatttttataagtttaagatgtacaacacgatgatttcacacacacacacacacactacatcacacatagatatatattgtgatatgattaccacaatcaagttagttaacacatctatcatctcacctatttgccattttttgtttttttggttttatgacaggatatttaatataatatctactcccttaccagatttcaagtctataggagtgttattaacaatagtcactgtattagtctgttttcttgctgctataaaaaacttcctgagactgggtaatttataaagaaaagaggtttaattgactcaccgttttgcctggctggggaggcctcaggaaacttacaatgatggcagaaggggaagcaggagtgtcttacatggtggcatgtaagagagagcatgtaagtatgcaggaaaaactaccatttacaaaaccatcagatcttttgagaattcactcaccatcacaagaacagcatgaggggaaactgcccccataatccataatccaatcacttttctccctccacacatgtggattacaggtccctcgcttcacacatggggatgagatttgggtggagacacaaagcaatatcataagctatggggatctaatgtacagcattatatataaacacattttataatggaaagtttatatgcttcgaccagcatctccccatttccctacccactgtcccctggcaaccaccattctattctgtttctaggagtgtccccctcctaattcttctttaatctgagttaatattttttgtagcacttatcacaatctaacataaaataaaatttccatgtttattatgtttattattgtttgtctcatttcctgcatgagacaccacctccaccatgtaatctctcttcgtaggaatctttgtcttctttgttcactgttgaatcccaagtggtgaaaactctgcctgacacattgtaggcayttaataaatatttatggaatgaatgaattaatgaaaactatgaactatctttttatctcattaccctgaaatgcactagttacatactctcctatactaagtgttaaaaagaattgatttattatagtaacttaatttcctattaacagagttcctactttaggttcaggcactgacaccaggaggtccttaaagtaatgcattttgataagtgaaataacccattgacatacccactagtaactacttgcatattgaatttatcawattacctaatttgtattaaagagagcaaggatctgagataatcaaactaagaatgtagtttttgatgaggagacttgagaaaaagtttgctgctggagtgtggtggaggcatacctgggtgattccagggcacatccaaaaggaaggagagagggctaggtgttgactttggttttggaagctggaaagaacatagttggggaaaataatctcaaaaaggggaggtggaacagaaagaaaaagccattccctttttacagttgtagtaggtccagcctggcttgttgcatttcaacaaggcaagaaaaaaaagaaagaaagagaaagaaagaaaagaacgaaagaacgaaagaaagaaagaaagaaagaaagaaagaaagaaagaaagaaagaaagaaggaaggaaggaaggaaggaaaagaaaaagaaagaaagaaagaatagaaaaggaaggaaggaaggagaagaaaagaatgaaagaagaaagaaaaaagccttttgttgtcatcagtgtattaggaaatgggaaacacacatatcaaccacagggaaaaagaattacccaaacaggaggttcattttaccctgctcctttcagtgaaagaagagagaattaaaaaggaggattaagtaggcatgtgcttagagctctgatggaaaaagcatttaaaggcagaattcacattccttaaaaggacaaatacacggcttttttctcccaaattatccatcaaggtgattttggtcacatgtgattcattagtttagagaaccaagttacttggctgtatttcagatttgaaaggagagcaacagtgggctgtgttaaatacatatatgtatttgcaccatttctatcctgatgacaggtggcaccattccaagagccaatgtttcctttcaaactatttctgagtacatttaatgatktaaatatgttcttaatcaatttattttttcctcccaaggtatcagaagtcctgactcaattcttcatattaacatatgcattccttactaagaaaccagaccataactaagaagggatttaggtatgagaagtctaaagctcattaccttaatttccttttttataggttaagcattgcaggatcatttttgagattctaatttttgatgtaatattttttaattacygaatgtgggctttttatatctgaggtgatttttttcttttaaatcaatgtgtccattaaagaatgtattattgcacaccagatggaattaaatgaaccattgtgtgaacttggcattttcagatcgggttacctgaatgtaattacctgcaggcagtttccaaatctgctgttcataagggattagcttgcgtatagagattctcttccattctcctcaggttttttttttttccttgaaatgcttttagtcattttggcttattgtaccatcatgctctgccactgataatagtgaaaattaatcctgaactaccagaattgatgatacagaacaagtcgacagctgtttaaaaaacaaacagacaagggacagcttatagaagagaacgttatgattttgtgccacataaaatttgaattgtctgccacaattctaataatactgaaatttggagaaatttctctatctattaaatagagtttctttcagaaatttatccccaaactgcaatgctgcatttaatttcctgttgttattttaaaatcacatcagttgaagaatatgaatgtctacacattttgaatcacattccaatttattttctttgcgartgagcagaattatatttcctgtgagtcatctcttcatatagggagtataccctctgggtggcatttattgctggtgtgtcaatcaccttcttattttatctctttaagtagtgaagagaggttatgtgtctgtttcctgcattgatgttaagtgcacaattttctctcactaaataaatatatatttaaacaattggaagaatgggatttcaaaattccattttaaattctcagcagtaaatcagttttatctttccctttaaaagtgaaatatatatatatatatatatatatatatatatatatattactactttcttcaagcagttggtgaagagcatctaacctgagactgggaaacatcaagttaatagaaacaatataatttataattttacatgatttcatatattatttttctgttagccttgtaaactttccaatgactcaagtgatttaaatgatgtgtgaatttttttagtaaggagttgaataattagctttcagagaatttaactagtatcattctaaaatacatgatgacctggaaaaatataataataatgaacataaccttacagaaatgaattatggaataatgatagataatcaaatatatgccaccagtttgtgaattaatgttagattatgttgaaaataggtcacttccaaagaagccattgttttcattgttattaatgtagacttgaaattgatattatatagttagtttctaacttgcaagccacaagataaagatttaggctacttwaagcaaaaagtaatttgctgaatgtatgctggactcattaagaggagtctcaagaattaaacctcgaaagccaaagggagcataactgctctggaagactaggaagcagggatggcaggaatgatcacatagtatctttttttaaaaaaaacagctttattgagatataattcaagagcataccactcatccatttaaagtatgtttcaaccattccttctatccttgtgtttctcattcaagagtccacatcttagagaagcatctgttgtccaggcttatgccatayctcctccttctgctggtgtcagagctggtgaggggcaaggcatggctggagtcacagcatgagatgagatatccacaggcagccacctggatttactattctgacaagcaagatataaaaaattaggcaaaatttatttttagtaatatgctgataaatatgttgaacaactcgttctctcccacccccaaaaaaccctgtttgttttgttttggatttacagatttccatcatgtaaatactccaatcgtaatagtaattttaagctaccagtgtgacagtatgtggagttgggtagggatgctaatcattggttcttgtgagctggaacaagctgattacagcacactacttagtatctccccaaaagaacatgggtactttcaggaaggggaaaatgaatgctagccattcaaaatgtacacacacacatgtaatgagcaaagatcttattgaccttaaacacagagccattcaatatgttgtttttcataaattagtgactcagtagataagaatttgggtgcagagatgttagagactactcttacgttttatttcataagaaaatagaggctactgtcccttgtcaatttcttaatttagctcaggaactcaaatggacacattaaaaatattaatagtaaaattgtaaactgttttggtagggagaattctaagatgacctccatgacactcacctttgttttttttcccccattaatatgttatattcatggcaaaagggattttacagatgcaattaaggttactaattaggtgactttaaaataggaagatcacacaggtgggcttgacctaccatatgggtcttttaaaagcagagaattttctctgactagtagaggaggaaatcagagagactcgaagcattagaaagactcagtgcaaaagaggcatgcattgcatgtgggaaggacctgagagcagcctccaggaaaggcgctaggagagccagaccaactactgactgaaattcatcaaggaaaacatggcctcagtcctacaactgaaaataacagaattttgccaaccgttagaataagtttggaagtggattatttcttagaataccagataagagtccagcctacccaataccttaatttcagttttgtgagtccctaagcaaaccatccaggctgcccagacttttgacctatagaactgtgagataacaaatcggtattgttataagctgctaagtgtgtggcaatttgttatacagcaataaaaatctaatataactatctataaggaggtgccttaaataaactttggcactacaagcatctgaacaaacaaaaggatctgtatggaataaagcgaaagaaaggcttttaaagaacattaagtcttaaatcaattgttagaagaagacaattggagtaaggaacatgaagtaagtggaggataaggggtggacaggtaatcatgtcagcgatgattattggcataaaaaagaaaccttactaacggaaatataagaagacaggcaagattgcattagagagtcataaaagataaggtcaaagagctgaggttggtaaattgatgaagatctaaaattctgtgtcaataagtgattctcaacactttgaggaattttaacccatgaggacattttagaaaatgaacaccagaatagcacttcagaaaaactgaatcagaaattctggcatatgtgacagcatctacatttttttaaacttctgtaagtgatttttgaggtgcagccaaggttgaggtccactagtgggaattctggaattcacagatatctaaggactatctatggactaaagctatgctagaaggtacagcctctctccctccctccctttctttatttcttctttctcaatgtaagaggaagacatgagtcaaccatagctgaattataatattgctgggtttttttacagcaaaaaaatgaagaatattataaaagtcaaacaatagaaggtgccaaacatgattcctattgtaatggaaatttatgccatattatttcattaatatagtttttaatctcatgcaaactgtttaaatgtatatatctgtgatattttaataatgtcccaagtttgatttccctagaagcagactctgagatatatattaatatataagatatttattagaatgttctcttgatatccacatggaaggaaggaargatgattttgcagaaagagctgtggagcactccaaagatagatgtcacccttcatagttgccccaaattgggcaagctgatgtggccttatattcctactgtgatctataattgaaggtaaactctccttgaaaaaagcagttttcctcacctgaagccatccacaatggagaatgtccactgagagccatcgtcacacggaattcttggcagctgggagaataagatttttaatcctgagaaggggtggtcaggactgcacatcacagagcccactacaaatgtctacttctagctggtaaacatacaggatgcatttgcttttaaatgtatttccctaattataaaaaaaagcctgatatctacaaatttgttcaaaatattttaccaaggatcctattttcaaaatatgtttgaaactagttagcaactagttatacaggtgatggtataatttaatgagataagaaatatggaaagaaggatatttttagggaagaggatgtgtacaatcgttgataagtagagtttgatgtatttgcataaaaacaaaacaaattttaaaaatacacgatttcatgatttcatgtgtcattttagattcagccctatttttgaaaagattgccaatagttgaaactttttaaacctaatatattcttacctcacacagttgtcagtttttttttctttgaaatactttttttattcacttctgggatattatattctctaggttttcattttcctcattctaaatatctttcagatggaagtgacagattctttctatgcttttagatatcagaaatttcacatttgtgattaactcagttctacaattgacatctttaccctcctcccaaacaatacagggacctagaatattttaattccaattaaagcgttgttacttataatttctattcagtgatttattttaatttttacttaaatattatttttatataatcaatactttctttagatttatccataagtttaatatttttaattaaacaatctttcttcctgcattttctgggatattttttcttatttctttttttttcttttttttattattatacattaagttctagggtacaagtgcacaacatgcaggtttgttacatatgtacacatgtgccatgttggtgtgctgcactcattaacctatcatttacattaggtttatctcctaatgctatccctccccgcttcccccacccaacaacaggccccagtgtgtgatgttccccttcctgtgtccaactgttctcattgttgaattcccacctatgagtgagaacatgtggtgtttggttttctgtccttgcaatagtttgctgagaatgatggtttccagcttcatccatgtccttacaaaggacatgaactcatcattttttatggctgcatagtattccatggtgtatatgtgccacattttcttaatccagtctatcattgatggacatttggattggttccaagtctttggtattgtgaacagtgccgcaatagacatacatgtgcatgtgtgtttatagcagcatgatttataatcctttgggtatatacccagtaatgggatggctgggtcaaatggtaattctagttctagatccctgaggaatcgccacattgtcttccacaatggttgaactagtttagagtcccactaacagtgaaaagtgttcctatttctccacatcctctccagtacctgttgtttcctgactttttaatgatggccattctaactggtgtgagatggtatctcattgtggttttgatttgcatttctctgatgggcagtgatgatgagcattttttcatgtgttttttggctgcataaatgtcttcttttgagaagtgtctgttcatatcttttgcccactttttaatggggttgtttgtttttttattgtaaatttgtttgagttctttgtagattctggatataagccctttgtcagatgagtagattgcaaaaattttctcctattctgtaggttgcctgttcactctgatggtagtttcttttgctgcgcaggagctctttagtttaattagatcacttttgtcaattttggcttttgttgccattgcttttggtgttttcgtcaggaagtccttgcccatgcttctgtcctgaatggtattgcctaggttttcttctagggtttttatggttttaggtctaacatttaagtctttgatccatcttgaattaattatcgtataaggtgtaaggaagggatccagtttcagctttctacatatggctagccagttttcccagcaccatttattaaatagggaatcctttccccattttttatttttgtcaggtttgtcaaagatcagctggttgtagatgtgtggtattatttctgagggctctgttctgttccattggtctatatctctgttttggtaccagtaccatgctgttttggttactgtagccttgtagtatagtttgaagtcaggtagtgtgatgcctccagctttgttcgtttgaattaggattgtcttggctatgcaggcccttttttgattccatatgaactttaaagtagttttttctaattctgtgaagaaagtcattggtagcttgattgggatggcatttaatgtataaatttccttgggcactatggccattttcatgatattgattcttcgtgtccatgagcatggaatgttcttccatttgtttgtgtcctctttcatttcattgagcagtggtttgtagttctccttgaagaggtccttcacaacccttataagttggattcctaggtattttattctctttgaagcaattgtgaaagggagttcactcatgatttggctctctgtttgtctgttactggtgtataagaatgcttgggatttttgcacaatgattttgtatcctgagactttgctgaagttgcttatcagcttaaggagattttgggctgagacgatggggttttctaaatgtacaatcatgtcatctgcaaacagggacaatttgacttcctcttttcctgattgagtaccctgtatttctttctcctgcctaattgccctggccagaacttccaacactatgttgaacaggagtggtgagagagggcatccctgtcttgtgccagttttcaaagagagtgcttccagtttttgtccattcagtatgatattgtctgtgggtttgtcataaatagctcttattatttttatatacatcccatcaataactagtttattgagagtttttagcatgaagggctcttgaattttgttgaaggccttttctgcatctgtggagataatcatgtggtttttgtctttcgttctgtttatatgatggattatgtttattgatttgagtgtgttgaactagccttgcatcgcagggatgaagccaacttcattgtggtggatatgctgctggattcagtttgccagtattttattgaggattttcaaatcgatgttcatcagggatattggtctaaaagtctctttttttgttgagtctctgccagcctttggtatcaggatgatgctggcctcataaaatgagttagggaggattccctctttttctattgattggaacattttcagaaggaatggtaccagctcctctttgtacctctggtagcattcggctgtgaatctgtctggtcctggactttttttggttggtaggctattaattattgcctcaatttcagagtctgttattggtctattcagagattcaacttcttcctggtttagtcttgggagggtgtatgtttccaggaatttatctatgtcttctagattttctagtttacttgcgtagaggtgtttatagtattctctggtggtagtttgtatgtctgtgggattggtggtgatatcccctttatcgttttttattgtgtctatttgattcttctctcttttcttctttattagtcttgctagcggtctatcaattttgttgatcttttcaaaaaaccagcttctggattcattgattttttgaagggttttttgtgtctctatctccttcagttctgctccgatcttagttatttcttgccttctgctaacttttgaatgtgtttgctcttgcttctctagttcttttaattgtgatgttagggtgtcaattttagttctttcctgctttctcttatgggcattgagtgctataaatttccttctacacactgctttaagtgtgtcccagagattctggtatgttatgtctttgttcttattggtttcgaccataatattttaaaatgtgtcttctttcttcctacatggaacttattaagatttctaattctgaggacttgcatgttttactaattctaaaagtttctcaatcattatctttttcatattggttctgactcattcactctgctctaattctggaaatgcagttggttctatgatagactattctttctagctgtacatctcttaacctgtttttcatatttttcatttcttatctccctctgttgttttctaggtaatttcttaaattttacaatatagattattaattttctattttgttatatgtattatactatttaattaaactacagtttctaattataacatttttcattactagaagttctccctcttattcagtttcaattattcctggtaaattttgatagtatactattttttagtcatatttcaatttcctcatttttcttctttaaacttattaaatgtgcttactatatgatcttatctgatgaaaccattattaacattctttcttattttgatactggaaccttttgttcacttttgtttttttgctggctatcactcacagtcattgatttgattgtttctttagagatttttaattgtgagttagttgaacatttttgtggatttatttgaggcctgaagttgaagtgagttctcaagagatacattttgtgttactccttttcttcactggaggaggtcatgattaactgggtaatcttaaaacttctttggcttgtgtttttggatgcacagatgttgcgaagtccagctgccaaccataaggtatgcgtaatataaataggtatttctaaagcagtttttaacagtcagggtttagtagaggaaataggaaatactttgtatttcaagcagtaaagaatataataaatggaactaggtgctcagaaaattattggaagtgccgaagaagtggaaatcagggggcatgcctagactttcaaaatcaccccatcatggttacgatacagaggtcctgaataacttttgttattgccccaccactgggctgctacagataccttatcctcaagaagctagtttctagacatttaaacatggactgcagttgctgcaaatattcctggtgcttgtgtgaacgttgcatctgccacaggaagagtgcttcatttctgccttctatacctggtataaattgacacacaggaccatggcttccagagaatctaaaaattgagcttttagattctccaatagagaatagaaggagagtaaacttctccaatagaaggggagtaaactgaatgttgagagagccaatccaattattcatcactttttttttttcctttttcttctatgtgaaggcaagatagggagacaggcatgtgtacccgccactttatctattgtttgtattacacctcatgcttctttatatgcttttgatcccagctattttcttctgttctgtcctaagcagttaaatctctaggattgacccaaggaagtcactggctttatcattcagttacccttacgaacttgacttttcctatccaatacagattttctgaaatccctttatgtttcatcaggctcaactgtgtatatagaagatgttttaaaatactggatctggtagttttacttatgatatacagaatgggtttctatcacatctgtttgctaaatgtacaactatgtcttaaggacatttttttctttttatattttttgatatcttaatggccagtacttcttagtctcctttgctaattcctcttcttcccagctgctaagtgttggaatttcctaggaaccagtcttcaggcctcttctcttatgtatttatattcttttcctaaatggtcttattcartatggttttttaaatgtcatctttatatgctggtgacttccaaattaatatattcaagttagrcctttcccttttgctccagatcatttatacaaagactgcatgatattccttcctagaagtttataaaacatttcmaacagacattaaaggtccaaaatataaattttactttctccaacctacccacaatggattttccctcagtctttttcacctcagtcaacaatacagtaatgtgttcagttagtcatacaaaaccctaaaaattatcttattctcttttcaggctgtctagtatccaatccaggaacaaatcctgtcagttctatcttaagtagaatcatttctcaagactctcccttgtatagtcagtatacaagactattgtatatatatacaatggaatacattcagccataaaaaagaatgaattaatgtcttttgcagcaacatggatggaactgtaggccattgtcttaagtgaaacaactcagacacagaaatataaatactgcatgttctcacttataagtgggagctgaataatgtgtacacatggacatagtgtggaaaggtagaaaatggagactggaagggtgggggtcaagtggggggatgatgagaaattccttaatgggtacaatgtacattgttctggtggtggtagatatgcaaaaggccctgactttactactgcacaatatatttatgtaataaaattacacttgtaccccataaatttatataaatagacgtgcccactatcatactagtctcaaccaccatcatctcatacctgtgcttcaataataggttaatagaaatccaagtaggtgactgaagaaaactaactagtttctcctctactgtcctcctttaaaacgtgtcctggccgggcgcagtggctcacacctgtaatcccagcactttcgcgccactgcactccagcctgggtgaacgagcaagactccgtctcaaaaacaaaaacaaaaaaaaaacaaaaaacatgtcctttagcaagcaatatgcacttttaaagatgtaaatgagataatgccacttatgagctaaaacctccaatgtctttccaccttatttagaatgaactacaaactctttatgtgatctgcccctgtttatctctgcagcatatcagtgatatattttgaatttacccctttgcatgccccattctagctgcactgacattattttcattgtatgaaaaagaaagtccatttcatctggratactctttccccagttctttgattttcccactccagtactttattctgatcctaaacaaatgtcatcttttaggggcatttccttataacactatctaaaataaccactcttgcacagctacctaatatcttatacatatgagtcctttatgacatttatcacaatctaaagctattacatatttgttttcttttgtattatctacattttcaaatttattccaaatttcatgagaacaaagttttggttttattttatttacctttatggcctatatatatgttgattaagtgcatggatggatggatggatggttdgatggatggatggatggatggatggatggatggatggatagacaaatgatactcaggtggagctgctcaggatcagtaggttatgtgggaataatgtatatcaggatatatacaggattacagatttgaaaggcatgaattcatcaatcattcattggactggatgaaatcgtccagggatagcacagcaaggataaaactctagagaaggccgatacttattttatgctttctaaagataaaaccatgttgaatttttttcttgctgcagttttagtacctactatagtccttcatataggagatgttcaatcaatttgacttatttaataaatgaattaaaaattggaaagaatatcccaccaaagggaatatgaagcatcaattagagacttaagaggagagctaaggaagtatgagttagttgaaactagaagataaaggggtttcaagaaggaagaactagtcaggaatctgaaaaactacagaagagtcaaataagataatgtctcaatacaattcattacacatatcaagaaaactggaggcattgacattatgactattagaagacatttgtcgctatactaartattaatacattgaatttatatcagtaaacacccttagtctatagtatttaaatgctcccttcattgcatgctggcatttcctagttttgaagaatgtctctatgtttttgatatctgttaataataatatgtctaagattcttctttagattcaagatctgagtcatgttatcaatacattaggtcatgctatcatgaaagaaaactaataatagtttctcaagatcctaattaaacatttggaaagakagtatgaaataactatttggaaactaataaagagatgactctgttattactgaatatcaaaggatggcaaatttgtgaataartccccagatttgtctgcaacagtcacagtaaaaatttagaattaacaacagttaaatctcaagaggataccacattaagtgcaactgttaaatattttctcaaggacacagaccttaacagaaaatggtggctactaaaagctgactactatgcaaatatcttggcaagacattgggtatctgagtcccctacaggacacagctgtgataatctttacaaacgtaggattctgctagggataggaaaagagccaggctcactggagacttattgcgaaaaaaaaaaaaattgtactttttgtgcagcttctgctctctgaataatctgattacatctccagggcaatttatatggatcactaaactggccayaaaatattataaaattataacctattattagttctgttcctttactcatataaacatttattacaggtaaaatacctggtggttgtgttagacccagataatactaatatttratcgcattaggtttaagaagaacaaacaaaagtgctttctcctgctcctttatattcaggcttgaaatatcatttaaaataacatagtagtgcatgtgattctgtttaaggggaggttcacaaaaccctatctctcctagttctgatatcaaagttagggagtgaggtggaagacccttatttctccagaaataagagaagaatcaggagttaggagactccatctctgcttcagatctgtccatcccatcacatgkgtgattaccaggcaaggttcttcagtgtccttagattggagagagaatatctgcactgattatatatttagttaattgctacatacatgtattgaaagaaatattttcatttcttcattaaaacatatattttatttagtatttgttttaacacatattaatttttaaagtaatgccagcttattataaatatcaaataaaatagaaatttacaaaataaaaaccaagagtcctacctcagttctaccctactcttcaacgctactctccctggatcactactgtgaatgggatgcactttgtcttccatatatctgtttagatgagtctgtatacacacaattccatgcaaacctataggaaggccatttactccatatagacaaccctgtcagaagaatctttcacaccttctctttcttttcaagtatatttcttctcaaatcttctaatctattccccttctctgaggtgttgattggaagaggatccagayaaggtagtgatagattacagaacacagcagctggggccattggtgattttgctccctgaagtcagattactgaaaggcacattctcatagctgtctccctactcttgtctcttttcagtaggagtagccagaaaaattatcttaaaaagtatatcagatcatttgtcttctctgttcaaaactctccaaaatctcatttcattggcaacaaaaacaaaaataatacaacagcctcagtgcctgctgctatctaaccccccccccatttcactcattatctctccagtattatatcctctgcttcccccttttccacttcattctggagactccagaracactatgttccttgaatatttctctctgagaaaatagacacaatcacaaaaacaattgttttattctctctgcttgggagttattctctctgcttgggaaattcttctcccgtatatagccatggctcatttcctgacctctttcaagtctttgctcaattattacattcttggtaacgtggacccagacctctactcctcattcaaaacagcaatcatggcctcaacactcctgataccacaacctgattctttctttytgtaacattgatcacatacaagataggtagtatatattgtacctttgtacatatttgttatgtgtattatctggcattctccaccagaatataatctccamaagtatatgattttaatcagcacagccctagagcctagaagagtggctagcaatagcagccattcaacaaacatttgtagaataaatgaatgaatacatayacatatataggagttaatatagcaaaatgcattagtgtgcaggaactagagtcagactggtagactctatcaattatcagctgtaaatataaataataattgatccataagtatctaaaacatactttacagggttcttaaaagggttcagttagcaattaggtaatagttgtaaagagacacaagttatttttttctggtcagttcttcctctttatggaactgttcttcttttccccctagctattagtttctataaaattgtcatgttcttactctctaatagctttcattttattcagagtcagagctcgatacttacaagagccccttcagggtgaaagctaattggtctacatatagcatctaacttaaactgagaaatataagacttgcctgaaattttgaacttcagaacacagaatgtattgccaacccacttcaacgatagtaactataagaagtacaactcaagtggaatcgctgtcttgtttctgaacacatggacaaaatttgacttacagaagaaagacaattaggcccactcaaagataagagaagttaaaagccagaaaaagagtgtgtgtgtgtgygygtgtgtgtgtgtgtgtgtgtgtgtgtgtgtgtgwgwgagagagagagagagagagagaactgggaatgtttgcattcctacttccagttggttctaagtcctagctgcatcctgtcatacatatgtgtaagtcatttaatcccctttctgtatccacgcagccaataaattgctcttcttttttccaaagaattttaagttgtttctattacttacaaccagaggagtctaatatataccacatgttttgctaggattaataatattaaaattaaggcagtaatagggattatgtattccctgtagtatctacaagagagctgttcataaagaaatttgttataatgttatattagcaaaagacattccaataatatgtcacattgttttaagacatgccaggagatataaattagttaagaggcataggaatatgttcttgggtacagactctttccacaccatcctttgagaactgcctctctacgttacccagaaagctatagctttcttgttttcttggacctaggggctaaaactaaaactcctaatgagacgcctttctttatgcagccttttcttctccccaggtaattaatcacatgctcttcagaaggctttgcttgaaacagtccctttttgatgtgctgcgatcaccaccagtcataactaaatgtaatagcaatttctccaaccatactggctttgataaaacatgctttattcytagaagattaggccattcattcatcatgtatttgatgataataataatgataatgatctgttgactgttagcttctgggtgctctaagccttttttagcttttaacacaaattacaggtaggcctcccagccacctgtccctytaggaaagtaaacagctctctagaaagccttctgatatgtttttttaactcattctagagtagcactttttaaactttaatgtgcagttgaattgctccaggatcttgtaaaatgcacatctgatttagaaggtatrgaatgaagcttgagatactacaaccctacatactaggtgatgttgatgctgctggtctatagactgcacttttgattaacaagttccaaaggatttattatgtactggtcctgttcagtgctctaatgtaatgtcaaagttccataaacttttcagtgtgtctctcctttacaaacagtaacttcccaccatacattttttwaaaatcayatgtggcaaattcaaaacctttttcttgtcttccccttctgagaactgaaacaaagaacccctgtcatacaggcatggttcttataccactactagtatcctttgtaaagacaatacttaaatatccactgggatgagcaaatcaaaccatttcctcatgtgtggttgtaaaggcatagaagagtttattttcattgtgcattatctttcagacttaacttagatcttattattcacctggaaaatggaaaacacttgcaaagaaacatccctggcttctctgtttttgcacttttatattttatttctcctaatctgaaagtttacttatgagtcaataaagtttcttctttttatcttgtatttaagtcttatacaaggagaacctaaaaaaaaatgttattcactgatccagtaacttaataataatagcatcatttcttgtgggggaaaatttacctttttcagttttgaagtgccatccccagacagtgatagctagtacaatagatgcagttcccttgtttgtcatagactctactggaataagagataatcaaaggatatactttcttttaatgtggacatattgccacataatgtctttgccctagggaattsatagcaagatgtagaaagtagctcttctaggtcactttgattccagtccaagttgcttgtgattaatactgctaacatcaacagctgctctagtactaatgtgaaatacagaatggtttcagtctagttcactgtagacaagttcccacagcatgcaaattattaatgcccttgtagacagygttaggactctaaatsgttttgaaactgaatgccagacctccctagagatgaaccctatgacaataagtcagcttcactggagacttactgtgaaaaaaaaaccgtygcactttttgtgcagcatctgctctctaaataatatgattagacctctaggacaatttatatggatcactaaactagccataaaatattatgaaattatgatgtrttattagttctgtccctttacccatataaacatttattacaagaaaaggatctggtggttatattggaccctgataatgctaacatgtaatagcattgggtttaagaagaacaaacaaaagtgcttgcccctgaagaaagcagwacagttttagtcaaaatcatgacctattaaaatttctggtcttgggaggctgaggcaggcrgatcacctgaggtgrggagttcaacactagcctgaccaacatggagaaaccccatctcaactaaaaatacaaaaaaattagccgggcgtggtggtgcatgcctgtaatcccggctactcgggaggctaaggcaggagaatcgcttgaacccgggaggcagaggttgcggtgagctgagatcacrccattgcaytccagcctgggcaacaagagcaaaactccgtctcaaaaagaaaaaaaaaaagaatttctggtctttagctgctgtttttcataaacaatcaatcatgttaagttttttctaatgtagctatgtactaatatactaatttaattggtgatagcaaaacatctctatcattttaatatgtcaatactcacatttgcaaacaatatgtatatagttgatgtcattcactagatttaactgtgtgacgcagtgatttataactaatacttaattagcaatacccataatttaaaaattttgtgtgatattcacatatttcaatgaaaaggaatctctctgacactttaggcaactcagaggtaaagtcaatgatctaataacaggaagatggacttttgcccatactgtagtgagaggtaattgtgtcttttctgagttctttatacttccggtgtgcggtgggaagaaagagttaaacacctgtctaggcacccttgattacacacacccaaattgaagagactggattatctttgtactagatagaatatgttgtcatttggtaattttacagatcctaacaacatgttttatattgtcttaagcacacttatttgggcacaggcaatacaaacctagcataaaaataccaaccaacagtaacaacaataacaactaaactttgtgcctactcccaatgaaacagaaaataatttgaatatttcaaattttaagtttttaaaaattagcaacatgtgttttgcttcttattttttctctctctctttctttcttytttyttttttttttttgagacagggtctcactctgtcattcagcattcaggctgcagtgcagtggcatgacaatcagggctcaccacagcctccacctcctgggctcaagggatcctctcacctcagcctcctgaatagctgggactacaggcacactatcatattcggctagtttttttgtagagacagggtttcaccaagttttctaggctggtcttaaactgggctcaagcratctgctcacattggcctcccaaagtgctgggattataggcgtgagccaccacacctgtccttcctttcttatcaaagtaattttttctctaaaacatttcaaaaatatagacaattacaaaaaataatataacacatatctatatatttgccaccaagtttaaacagctattaacatttgccatatttgccttaatgaaaataaaattgtagatacataaaagcgtatatctgtcccttctcctctctttctttacagaataagttggtgtaaataatttctgtgcagtcttttgaactgtattccttttgtatacccccaaatttataccattattatattctatattttaagaatttatagcaatgatattctatgtttttaaatatttctttttttctttcaacatattttttatgctaatgtaggtagctctatttcagtcatgtttactgctatatgacatttcactggaagaataagccacataaatcacagctttctggtaatgtggttctacaacgaatatctaggttatttaggttttttcccactaaaacaagcaatgcttcatcaaacatcatggtatatatgctctcaggtatatgtgtgggatattctctaggataaatgcctataagtgtagctactgatacagggtatgagcatctgcaaattccctaggtgttgacaattgctccccaaggtgatgtgccaattgtcactctcaacagtagcatgtaagtccctattttgcctcattctaaatagctcctggtattgtccaagaaaaaaagggtgattgtaaatgacatcatatttgttttactttccccctgaaatatcagtgaaggttttgtgtatcatttatattacattaacccttactgttgatttttcatatcaaagtccagttttctatttctttgtttggttctttatttttatttatagttgtttctatattttaatattgattattttcaattaaataaattttaactttagtgtaaatattttgtaaaagatgtggcatccaaaaattattgaagcaattcaaatctttacttatcccttgtggggagaagtttcttaagtaattatttcagtttatattactagtacttttcatgtatctcagtattaagtgttaagccacaattcttgtaattttataacattccatagagaagtaaataaatataggaaagaggatttacttatgttgcctgagataaacacgaagaaagtaaataattttttttcttgataatttgatggatttttagggttttatttttaaacattttgaaaggttgaattttactgtacttgcaggccaagaaattaaccttccgcagtttcataaataatgccaagagacatgagattcctgtctaaggaagtggcacaagtttcatgtttgcttcagctcccctgccccactcccatcaccaccaggaggtgacacagaggacctcactgaggtgacacagaggagcccacatgaatgttgaacacatcacagatttgcattatcgctgaggaaccccagccttagacaaccccaatcttttataataagcaggaggaatgactgctctttgcttcgaagggagacactatctttattatattggatagcaagcaaacctgttctttgctttgaagggaggcattatctctatcttccaagatcttctctatataagcatccttgaaaagctggtcataaacaaaaaagtagttatggcctctgctcacaagatayacagaaatatgagagaccaatgaagactaatctctcaaaacttgtggccggacaaataaaaatgtttatatgagtaaatttaaacgtttgctttacattgaattttgtaaattacatgcaaactttttaaaactaaagctttccattcaaactagtatttgtacatttttcaaaaataatttaaaaagggcttgaaatacaccctttgccttccctagtccctgcyccaccctttgccttccctagtccctctcctcagaagtaaacactttgaactcttaggttttagttttctgatttgttatctctaacaatgtgctggtaaattaacagctggctctccaggtttagtcccaataacaatgttggttgatatattttgtttatataagatacaaattaaatgatgaagtatatgtctaaatttgaccattcatcagtgatgtgaatttttttttgctacaatacataayagtttttgaacaggaagcatattttctcatttttttggtgctatttatattttagtggccacacaaatcacacagttttaaatggaatcaccgttattgacagtttctccatgactttcctaaatccaatcaacaaagcaatatatcaagcccttatatgyggtgcaggatgatctctgtggtgtaaatgttctcgattacaagtcgccaatttgccatagcgragcatgcagttgggaggggacgtgcagtagcattccattgcatagcatgctgccatatggatgcaataggtgtgaatcattctcaagaatgtagataacagtaaaaggtagtaaagtaatttggaagtgacaagtttgaatataatttttataatataaattttgtatttataaagttttacagtttgatttttagtcatggctatgtttattaaccagctcacaaaacttctgaaaatttaacatttggatcttgtgagcttgttcaagctggctctatcacaccactgactacctccataccttaaaccagtatgcaaaccactactttttgatttatcagttctatacattatcttctgatttcctgcaataatgaaaatttggctcatttatgttattttttctctccctgtagtagcctgtgtccaatatgacccccaaagagccttttttcctggtattcagctctttgtgaaggctcctccctcacaaaatgactgatctgtgtaaccaataggaaacaattgtatgtgactttaggatgaaagagtcattgtgatttcggcctgactttcttgaatcacttgctttagaggaagctagctaccaagttgtgagaacaccaagcagccatacagacaggtccatgtggtgagggtctgaggccttctgccaacaaacagagctcctacctattctggaggcattgcttcatgttattagcatttattgttgctaacaagaccactaatgccaacctgattcttatttctgtgtcagtgactgttatgggttgaattgtgtctcctccaaaaaagatatcttgaagtcctaacaactggtatttcaaaatgtgactttatttggaaatagtgtccattcatatcttaactaattacattaaaatgaggtcacactggaaaggatgggccagtaatctaatatgactggtgtccttgtaagaaggacccactgacgacagagacacacagggaggatttcttgtgatgaagaaggtagggattggagttatgtagctgcaagccgagaatgccaaagtttgccagccaaccaccaaaagctaggaagaggcaagaaagggttcccctgcaggtttcagagggaatatggccctgaccataccttgcttatggatttccctccagaactgtgtgacaataaatttctgttttaagccacccagtatgtggtactttgttataacagccctaggaaacaaatatagtgaccttgtttctttctctcaggaaaaaatttttctttatctgtattagctcattttcatacagctataaagaactgcctgagactgggtaatttctaaagggaagaggtgtaattgactcacagttcagcatggctggggaggcctcaggaaacacaatcatggtggaaggcgaaggggaagcaaggcaccttcttcacaaggtggcaggaagaartgctgagccaagggggaaaaaacccttataaaacactcagatcttgtgagatctcactcactatcacaagaagagcatkggggaaaccgcccccatgattcagttacctccacctggyctttcccttgacamgtggggattatgggtattatggggattataattctgatgagatttgggtgggaacacaaagcctaaccacatcacctatttatcttttgttgtttgcagtttcccaaaggtgtgtctaactgcaattttcctttttgatttttttgtgccttgtgctgtgtaactagtatattctagcacatgaaaacttttaaattctggaaaattctatgacataatttgataacttcaacccattatctcctctcttyttttttttttttttaactttctgtagaaaaatgttgaagctcctaaattggcccactatgccccttttctgtctgtctttctttttcttaaagttcttttttgtcattctaggctattacttttttaaaattttgttaatcatttaaaatttctttgggttcctgctgttttatttctttttaattttcagatgttcattttaatcttacctwtagggagccatatatacttgaatctctctgaagtgctaattagaaggggaggagtttttttggttgttttgtgtaagtgtattctggtttctagattattttcagtttttggttccttctttgattttaagttgctctttttctcaaatgtctgatgacactagttcctctttaaagtgatgcactacacactgttctctgatatttctatgggtttactgactggtggagaggtaagaggtccactattaagctggagtcacctaatgtcccgaagrtgaaagagtttgtcttaggagcagtaacatttatacctagagctctcagagggctttctctttggagggaaaattgaatggtaaatacctggcagcaacatggggaaagagatgggagtcttaactgcccatatagattttcatttaatactccagtgcttaggcccatcttttacttgtacccttctttatgcctggcatttccaaggcccaagactctccttgggcttctcagagtatattgtgggtctatctaatttattctgttttgtattcttgcaacaattttaacagaatctcaatagggaaagtagataaacagcggtttaaaatcttgaaccagatatacagaaatctttcttttttcaaagcacattttaattcagtttatttaaatgataaaaacatatccataaaggcataacayatataatttaaaatttctatagtaaacaagataaaaggtccaaaatttcggtagatactacatatgaccaaatgtaaaacagcatgtcttccattttgcttatttctaaaacttttttttcccctttaaacaattgtaatttgtagcctcttagtccttckactatttttttttttctttgagacagagtctcactctgtcacccaggctggagcgcagtggtgcaattttggctccctgcaacctccacctcctgggtacaagcaactctcaggcatcagccttgagtagctgggattacaggtgcccgccaccacgcccggctcatttttgtatttttggtagagatggggttttgccatgttggccagggtgatctcgaactcctggcctcaagtgatccacccattctcagcctgccaaactgctaggattataggcgtgagccactgttcccaacctttagtaatggtttttatgtgtacatcttcttatttgtgatttcatcctgaaactcaacatgacatgacataaagtggagtagaccaatggccacaggctgggaaagtcctggatttgcctaggagttgtgggatttggggcaaggtatttcagctttcagaaccttgagtttctctatcatgaagtgagatattgaactgggtgaaatattatgttcttatcagactttgtgattctgtggtttaaatagaaatattttattcttctaaatatatttttgcaaaaattttaagtgtaatttttgccatagaatagaacaaaggattttatccagatctactctcttatcttctgaattattatctgaatcttctctccttctattccactattatcttggtccaagctatgcaatattgtatcctacccctctataatccatctctgtatagcactgwgagatagcatcttatactgcaaatcaaatgatatcactctactactaaaaactcttcggtgatagcagtaataaagtccaactccttaccaacacctgtaagtccatgtaagtccaacmcctataagtccatgatctagaccctgcctaattttccatccttagccctttgcactagytaaatttgctaaaaccaccatggtcatttttttcttccctcatatatgccaacttttcctgtccctgctgtctttctgccaagactgctctctcttctgcatttcccagggctatgtatttcccagggctagtttcttcagaacttcgcttaaaatccatttcctcatttaaaaagagaaaaaaaaacttattattatcattccccctcctaaatccatggtttccttaatcatactcttcacaatttgtaatgatttgttactttggtgagggcaagaaacaagtttttcattgatcactttatcccttgtgcctggtatcatttctgggacaaaacaagtgtgtgataaataattgatgaaagaggaataggcactaaaatgaatgatttgtatataaaacctagtattaaaatgaattttattttaggaaaagtgataactggttatgcagagcaaaatcaactatggtgcaaagaaataaagaaaaacaaattgcaaattattatgtttccttcttaacttgtgtatttttttattcaaactgcattaaattaggcctgcttattttcagatttttycaggctgaccttgcttgaaattggaagcatttttagaataatttatgcatcaagaaaagggtataatgctttagtgatgcaaggcccccgagggcagagtatcaagtaaaayattcatgaagcttaagtgcaagagacatcagattttctgtagtattttaacactgcatttctgtacaagggaattgtaaagtgcaagaatatgagagaagataaatattgaggacaataaagagggcctgtaaagtgagttcttgcctttccgattttacagctattattctcccaagtgtgaggtgactgtgtgtgtgtgtgtgtgtgtgtgtgtgtgtgtgtgtgtattgggtcatattagaagttattagaagttcccttataataattataaaattaagaaataatataattggctatgtgggttaccatctgattttcattcacatctgactatttgaattgggatgtgttttctttaattattttgtatgaaaaagaaaagatggggcatagtgtcatagtagttgcatacgttttgtaagaaatttcaagttctcccagatgaaagataacctttgtttttcaacttgttttccactttcaactgtacgcttcataagacattcattatttcccaagatgttcaaaaaagatacagtgaaagggcattgggaaatatttaatatgcaataatctttagagtccttcattttgaaaatggtctctaaaagttaaattagtgataacataaaaagaaatctttccatgtaaatttgtctacaggtatttatttatctttctgatgtcattgattcctttgttctgattattcatcaaaaaaatttttttaaatgtttggtagatttggggaatcaaatattatgttaaagatagaaagctctacctcatcttgaagactttggagaggatgctgatctctgacctgtggctaaccgtcagattttaggtcatcgtgcaacatacaaaatattagattatagaatgtgtaagcttagaaattagaaattagtgcagtctacaatatcttcattttgtaatattcttgaacatttaatctgtttagaatataatggtctattagtatctcagattaataacatcttgcttcattatctttctttttgaaaygtttagaccacatttttctttcagagcagtagccataacattgtctgaaatttcaaatgaagacctttccaaagtaatagttataagtaaattacacagtcctccttgatgcatggagaagccttataattgttccaagtaaattcagaagtaataggtaataggaaggttatattcaccctgatagcccttacaagactggtcatcaacattcagaaccatgttaattgccaacactgtcatgaatggggtatttatatacctaattttgctgcatggccaaagattccataaaaataagactttatggaggtagacatgactggaacatagaaaccatagcataattaagcagaaaattccaattacataacatttatgtatttatttatgattcctcaactgtggccatgggtggcttctttttcttttttcccccctcagctttattaaggtaaaattgacaaataaaaattgtatgtattcacagtatacaaggcaatgttttgatatatgtacctattgtgaaatgattaaatcaagctaattaacatctattgttgcacatacttatattttgtgagagcattggagagcttaaatcagcaatttctaatttttgcaatatattaaatatatattttatattgtatatatttaatatatttacartatatttttataatatattattattaactatagtcatattatacagtagatctcttgaacttattcatcctgcctaagtaaaactgtatcttttaaccagtatctccccatttccaccgccagccttctctagctcctggcaaccagcattttaccctctacttgtatgaatttgatatcttttagattccacatataagtgagatcatgtagtatttgtctttctatgcctagcttatttcacttagcaaaagttcctccagttttatccatgttatcaaaaatgacagcatttccttctttttaaaggctgagttgtattctagtgtgtgtgtgtgtgtgtgtgtgtgtgtgtgtgtgtgtagctcacattttcttcattcaatcatctgtcaatgaacacttaggttggctgattccgtatcttggctattgtaaataatgctgctgtgaacacaaaagtgcaaatatctctttaacatactgattttatttcttttgtatatatactcagaagtaggattgctggatcacatggtagtccaatttttaattttttggggaaactttttattgttttctataatagctatactaatttaaatttccactaacagtctataagcattcccttttgtccacattctcaccaatacttgttatctttagtagtagccactctctctggtgcaaagtgatgtatcactgtggttttaatttgcattccctgaatattaatgatgttgagcgttttttcatacccctgttggccatttgcatgtcatcttctgagaaatgtatattcaggtcatttgcccatttttcaatcagtttatttgttttcttgctattgagttgttcaagtttcttatatattttggatattaatagtttgtacggtttgcaagtatttttttcccattctgtaggttgtctcttcactgtgttgattgtttcccttgcttgaggaagctttttggtttgatgtaatcccatttgtctgttttgttgccgttacctgtgcttttgtggttacagcccaaaaaaaatccttgcccagatcaatgtcaagaagccttaattctatgttttcttctagtagttttatagtttcagatcttatgtttaggtcttaaatccaatttgagttgatttttatttttagtgtgagataaggattcaatttcattcatctgcatgtggatattcagttttcccaatgcacatttattgaagagattgtccttttcccattttgtgtacttggcaactttttaaaaaaatcagtgactgtatatgcatggatttttttctaggctatttcttctgaccccttagtctatatgtatgtttttatgccaacaccatgctgttttaattgctatagctttgtagtatatatcaaaatcaggtactgtgattcccccagctattttttgccaaagattgctttgactatttgggtattttaggtctccatgcaaattttaggattatttttcttttttctgtagttaccttgaattaaaattagtagtttgatttcaaatgtgaaacttgtgacttttttatttatggcaacagatttttacaattatataatgaaaagcaaagagaaaattatatttgaggtcgaaattcctattactattacatttttagaaatgcctcatggttatatatgtgtgtggaaatgagaacaaataggactggaagctttgacttcctgctccctcttcagcacaatactccaaaacagcatttcctcctttctctctcacaattcatcttcttttcccccttctctgatcttgctacatttttatttttattttttgttccacactgattgtagcccaaaggtgataaatttgtgtggactaagtgcaagaggagattggggaaaatttgtttcattgttgtgtcattaaactcagttttcccaccaaagmctgttctaataatttaatggccatgaaaattggttcttttttagagtaaaatatctttcctggctcatttgaaagttgccacattcartgttgcatttttatctgaaattcggaaataactgaactttcctaagcgaatctcatctcaacagatttttagtataatatcaatgtcagagagatttgaatagactggattaagaaagccttgggtaaatgttagaatattacaaacctgtcatacctctttattattctgtttaataattcataaataggagtcctgctaagttttgataaataatatccctgtagggagcttactgagctgtcattggtatgcttgccttccaattttcctgccctgctcctatcagagaccatcttcagggttagtggtaacctagcagcatctttcggtctttccttgcctcaccactgcggcgcggagctccctggagtggaactggctttgcagacccttcaccagcctccactcagctttcactctcactttctgcttgctttcacaccaggagtgggatctaactctcacactaccatgggaagctgaatttatgttgtactatttcagaataaatttcaagttgttaaaaaaaattaataacttttgaagtacttaaatattatcatttaggcatttttgctaatttttcttggtgtttggcaatcaaccaccaggattaataatctgatacacttttttccttcaaacacatttaatttgtaagtacatcaaaacataattttattacaccttttaaagtttcatgtctttattagtaagtataaaatagttgttgcaaaaataaaaaatataggaacagatgatatgtcatacttttattttagacttggagaaaaagcagagatttcctataagtggtagttgagaaaaaattattccttatatgattttcatcatagtgtttgacgttacacttaaacactacactaagataatagtaatcataacactctattaagtctactgtatgccagttattcatataagcgctttccatatatttgctaatgtattacttagttaacaaccctgtaaggtaattactatttgttatctcattctacatatggggaaactgaggtacaatatatttgtgacttgtttaaggtcatcaagttagtaaaagtagctagattcagtcccaggcagttgcactccagagtacgcaacttaaacactaccttatactgcatctctgttgaaaaaaatgaaagctggttgctgcattgaacaatatcaaaaatttattatttggagaaattttctaatatctgtgtctctaaaatatgggtcagtgacgtttttggggagcaaagttcttggagatttaacatgtcatgataaatctgggtctttatatacttgtgaaatgtttcaatccataaaccagaaaattggatacttactttgattaacatttctgtaatggcacaaagatttgctaagaaagcatctttgaagactggcattttggctgtattgatgcataaaattttctaaccatatatctactatattgcttatcttatttaagtaaaactattccaaaagttattttatataacacaaggtcaaactatgctgacaaaaatcattactcacttcatacacatgttattgaaggtaatatctgtttaattctattctatatcctaagcattttgcaaaacacatagcaatgtatatttgaacccaagctgaaagtgaaacatcagtttataaagatgagcttcctcaaatttgtatgtcataattacatattagaagtgcaatgaagtacaaataaaatgaataatttatagttagtgtcaatgcagttaatgaaaatgtccgaagcaaagtgtttaaatcataactaatcctgcggggctcatggccttcacctatgctttagaaaatggataaatgccatctcctggaatggcctccttggaaattattctttggaagatgaggccccagactgtgctggggttacctctagaatttgggggacattggcactcatagactgcttcccacagaggaactggagcattcatcattctactggacctctgcttagcatattctgggtatatatcagcatgggtgcagaagaccaactacacgtagagggaaaacaatcaaataaaatataaaaagatgcttggttttataaagcagtaaatatagtcttctattcctagtatatgtttgcaaaaatattgttttaaaaatcagatctacatagaaagctgcacagaatggacaataatgggtactcagcagacccaggcagggcctgccttcttggctggctatttatttatttatttattagcttggatattcttctctcttgctgctgaaactgcctctaaaagcaaattccattcacatcttcgcttgatagatgcagtcagaatggcaggcgagaaagaactatcagagttcaaggagaatactaatgcctcttcatatatacaggcacattttcacatcatgtgaatattgtatgaagatgtcacaaattatatgttcacatgtacatatattatcattttcacatgaaaatgaaatatgtcttatctcacacaggagaaatgaaagtcaaatgcgtagtttgccatctactccattacttggggctttctataaaatgagctctctaaacctgtattttcaactgaataatctcaagaggtaacacaactgcatacttttttttcttttaccatccatgctgatacttgaatgaaatgattaataatttggctgtattttgaatattttctatatttcttttttctctctcattcatggaaattttcagaatattctcaaataaagaaagcatgctgaaaaaaagttacactagaatattgctccttctagccccatagaatttagcagagttttgcacataatagaaaagcaaaattttaaaaatggaagagtcatagtctcctaattgtattccttcattttacacaggagaaaatttaagcttatatatagtatatgactttgctaaaagtcaccttaatgtaaagtcacatattagagtgagcatccagctctcagtgttccagggcaggattatttctagtgcagttcttttttatttaaaaccgaaaacaaataaactaaaaaatcctaatggaacaataacaataaaaatgccttctctatgccttaaactcagataagtagacaaatattataccttaattatgataaaataaataaatgtaagaaaataatatgtgtgggatgggggtataaaatgatttatgtttctttaaaaatatgtgtggagttgatattcataatctgatatatggtgacttaacagaagaccaggtatcagtggcatgtgatacgcacatagtgtgctcagaacattttacatcttgtgcagaggaaggtagaaccattttgtttaaagaaaacccagaggattttagaaaattacctaaagactgctgagctgtcagcaaaaatttaaggcttccaggaaaagtctgtcatttatctgtaaaacacccatctaccactgcctgcagcataaaggacaaacttcttagcgttatccatgcaaccttcgttaatctttcccaacatgcccagttgcttttctccccaatcacttcaacagaacctatgctttagcagtcctcaagaacttttagttcctagaagataccattgcacatgtcattccttctgttggcaatatccttccaagacatcaatcatagatggttacagaagatattgcagagaatatgaagaattggaaacataatcaagtgcaaaatcagtaaacactattcaggagataagatgcagattgtgatccaagctttataattattttgtaggggaatcagcaaaaagcttgagaagtagatagtacaaggcagggagctattttttttaaaaaaaatccctccctgcctgtttgagtatcttctagttaacacatacatactagttgcagtcacataacatataatttaattttcataataaccctaagatataggggctaataagtcttttttgaagaccaggaagccaagtgtaaagcatcatacctagtaatcagcagaaccagacaccaaatcccagtcattgttgaaataattgtaaccttaaaaattatttaatgtttatcactgtattagtctgttctcatgctgctaataaagacatacccaagtctgggttatttataaaggaaagagttttaatggactcacagttctacatggctggggaggactcacaatcatggcagaaggcaaaggagaagcaaaggcacatcttacatggaggcaggcaagagagtgtgtgcaggggaactcccatttataaaaccatcagatcttatgagacttattcactaccacaagaacagtatgagataaactgccctcatgattcaatgttccacctgtccctgcccttgatatgtggggattattacaattaaaggtgagatttgggtggggacacagccaaaccgtatcaatcacatttttaaaacacaggtcatgcattcatgttaatacgtacaagtacttcaaaccttcttttcacagcaaatagttatttagttggtagagagttttatagaaaatttggctctgcatgcaaacagggcctcacagagtgacagcacacagacagttgttagaaaatcccagcatctgatccacagctttgcagattttatgattgaaattggtaataaaacaaaatggattagcctttgagactgatcaaggttattgacattcacaagtgtctgatatatacacttctgaattattcatttacatttacaattagaaatacaactatcaagcagaccagaaatgttatgggcattattctctacttgttctctttgtaggcaaatctacaaattacaatcagaactttgtttcatgaaaatggagttaagtcagtgataataggaagggcaactacaatgctccatgcattgtgctaagctgcatattgctaaactctatatttgcattattttatttagtttttataatgttattatgtgaatattttatagataaagaatgggagactcagagagtttaagtaatttgcctacatttacatagccaataaggattagagccagattttaaatctaaatttatttaacttcagagaaatagatcttaatcatgacccagtgctgcctaccaaacatgatataagctccttgaagtcagggagaatcataacaacattaacagctcccaatggaggagtgtctctcatatgccttacactttcattcatcctctatgactcactctaactctcatatcaaccctgttatatagatactcttatcatcattttacagaaaataagacagaagctcgaatatgaaatctaagcccatattgctgacaagtagcaagattagagagcacttaattcctgactttgaagcttgcagtcattctcttgctgtatgctataattccaagccaggcattctyatcagagggacaggtggagatcattgaatcataatcaaggttcattgttgtgaactttaaaatagttaataactatattcaaatattaactattttaaagttcaaagtttgaagaactctaaaatagtattatctattttaaaaaacctattaaagaaggaaaagtaccaggaaycctggaaaaattaatcttgttgccctgcaatcagagccagccaggaaaagaagcagtacacagagtcagaaacagctacatgtgaaaaatcacatagtattaactattttaaagttcataacaatccaatcagtgcaagtctataagtattcacatttcctagataggtaagcttagtgagaagttaaataatctgtccacagtctcacaactagcaagtggtgtccctgtaaaacagaccaggcagtctggctccaaagtcctacactctattgaatgatcttaataagaaatgacaactagttttatggcctgatgcattcaawttcattctagaaatatttatccatgggcaacagaatgtctccccaatacagagataagaaaaatgatgcaaagtaaatgtattcctaaagagcaagactatttttgtagttgtagttgttgttgttgttgtagaacatggtggggtacaatggagatgcttggaccaaagcttgactacctaccctaatttcagtcttgcctccttaagacttgatctctatcagtttgatggaatttgagtatgcataaaaaagatgtattgtggtcaacagaagcaatcaagaagggcagaaataaagcggagttgtgaagagctacatgtgcaagtcctgaaaatatcattgtgtctgggtgagattcaaaaagaaggagaacaaaaacagttccccaatgggatgtgctttagaaagccaggtgaggctgaagacatgactcaggcatccttgttgtaaaactggctttgaggtaacacatagtagtgagcgtggacttccatggttcatacataagaagattctgtggaaactagatattttaatcaattctaaacttaataggagagctgtcaccagatgtaacttctaccaaaagagaggaacctattaaagaaggaaaagtaccaggaaccctggaaaaattaatcatgtttccccgcagtcagagctagccaggaaaagtaacagtacacagaatcagaaacagctagatgtgaaaaatcacattacagaaagcttagagaaagaatggctaggagatcagataacaataaaatgaaaatgccacaaaagaaaagagaaactgtcaaaatggacttcagaccacacaatcacagatggtgytgataaagaagaaaatgggcatccaaagagatcagcacagcagcccaaggagctagcaataaatgtgagaacatggaaaatgatgaaagtagaggtatataagtaagaatgataatggaagaataatatagacacctaaaaaaattgacagtgagtttaaagcaagaatggagttgagaaaaattccaaaggtgttttaaaaatcatgcgtaatacaagaaagataataaaaagaggaaactctgctacttggggctgaggatgacatattaacaatggccaagggaaagcagtaggcactattttactccatttagcctcctccttagacagcaaagaagataatgttcacagtagcaagaaaatgagccccatgtataagagtaggcacctacaaactttgataacatccagtattattgtgaggacttgaaattgacattgttgaattatcgatggtttattcatgttattgaataaatgtacacacaagcacacacatscacacacacacacacacacatatgccagacactgtattaagtaatttacaattattaacttattttatttttaaagcaactctacaaagttgatgatctttctaccattatggagaatagaaaatagatattaaatatgaggataacttttttcccaagatctacttgtccagtaacactaagccttttaaatgaggttctttggcataacttgttttcgttgaattcatgttgcatgaaagaatcttatttatttttcataatttcttataatttaaattgcactaatcagttgaataatcttatgctgtttagacattaaactgactaattattgagaaataaagattatgtcacagaagctaagaatgacagacttgtcaagctacagaaaggactaaatgtaagatgaaacaggaaagaagcaaatttttttgagggaaagaatcccataattctggtagaaaagattgagtgttccctgaggacaaagattatacattaccaatccctgtatcaccattatcgtatacagtgacagtgatttatagctcaaawattaggacttttaaacacttaacgtgattttaaactacgctaaagtaggtataaagttcagattatttactcccctggggtggctcatccktgtgtgtgtgtgtgtgtgtgtgtgtgtgtgtgtgtgtgtgtaatctttatgtatatgtaatatttatgtatatgtatatgtagtctttatgtatatgtaatatttatatatgaagatttatatatatattttataaataagatatatatatatatataatatatataaaatgttcaataaggcctgtaaagtgaccctagacatattgtgttgaagacctaaatgcctactagatatttttgcctggttgccccctgagtgtgtgaaactgagcttatttttaaatttcctccacaacttatttcttctagatattctacatttataaatcaggacaattattgtcattattattattatcatcaacatgtaaaaacctcaatgatttaatgcaagagaggtatatttcttgctcatgcttataaggctactctggggagagtgttttctcctctcctcaacattcttattcctggatccagactgtttccattacttactactgtggaacaaaccaccccaacacttggtggttttgacataacagtgctattatgacttcttatggttctgtgggaggaatgggctcagtgaggggggtttccactccatttgatgtctgctgggattgctgtcatctgacaccttggttgagctggattgtccaacattggtcacttgtgtgattggcagttaatactgaatgttgactgggggctccagtggggctgtctgctggacagccttcatggagtctgtttacgtggattgggtttctcacagcacagctgaagaatttgcagaggccatatctcaagagcaagtgttccaagagggaggaagtggaagatgccaatactctttaagactacacctgaaattggcacagcatcatttctgctatgtcctcttagttaagcaatcgatcttgtgattcacgaactggaaaaacaaactccacttctttatcaggagaagtaaaagaatgtgtggccacctttagtccatagactgaaaaaacagccactatctagaatttgcttgtaattttatcagtttaagaaagagagctctgcaggacctcgcatcagcaaaaaatatatttgccctgaaagtgacacattttacttcaactcacaattccttggccaaaattggtccaatacctacatgctaccacagaatgcaagaaagtatgatcctactacagatcttcagagaacagcaaaagaatgtaactccagtttgtctcttactctcaaaatccgctggtgccctcattaattattacccagaacatcacaaagactgacttgtctctcttcctctagctgagcttctttctaatttattttacaaacctgacccagaaagaaagaacactgtaaaatataaacattattgtttaaaaatcacataaaatcataaacatataaaacccgtataaatataaacttacctacttatcatctttcactaactcaccacatttgttgagcacctccaatgggtaagacactgtgctacttcttgccatcacaaattttacatttttaattttgtccctctgccattgttatcaagtatagaatacttaatatgattcataaagtatataaaaacaagggccctggcctagttctccagcttcattttaggataagcaattttatttcttgctgttcttgttaatttagcttagttcttttatgattatttttttctcaaagaataaatttttttttcaattattcattctactttaagaaccactaatttttggtgtctgcttttattaccatttgtttcatttatggaaaatgcttttatgatttttttctaagttactgaattgaatgcttacttcatgtatttttattctaactctcctaatcataaaggcatttataaaatgaattaaacagttatgaaaactttggctgcctctcatatttttatatgttgtagattcattctaattatgtacaaaattatttatagtagcattttattaaaacataacgtgtaaacaaaaaaagttgtacaagaaagacagaaatcactgaaattccatttctataactttgatacatattttttcatcagaatcagctatcttgttcatatttttgagtaatatggggtcaaacatttacattattttgcaattatttttatgtacaagcattttggaacagtttttatgacaacaaatatgtgtgtgctttgtgtgtctttttatttcttttatttctttataaggacaaatgactatttgtctctaaggtactaaggttgattttaattttttcactaatgaaaataatttggaatatctatatttaaattcttatatggcctgttttcaattttttttatgtttttatagctaggatttagggatcaaatgatatttaagtctgaaggtttttcatattaagtaatcattttccctcttacaggttataacaatttactctcccactaacaaaaaatgaaaatgtctcttttctcacctatcaaactatattatcctgctttttaatttttaccaaactgacaggttgaaaagtatgtacatttctttgattactaatgccactgattattttgccttagctaattatttatttcattatttatgcatatttttcttattaattcaagaggactccatgaattaaaaaataatttaattattaactccatgaattaaaaaatattctgtcatatatgttgaaaatatttattcccaattttttcatttttctttaaatttttcctatttttgggggaagttttgaatgttttatgttatcaaactattaattttcctttttatagtttctgctctggctgttatatttagaaaggtctttcttttggtttccaagtttattttatttatattgctacaaaatatttcattattttgcagcaatatagtttatattaaaatttatattgctacaaaatattgctacaaaatattttgttattttgcagcaatatagtttatattaaaatgtttttctttaaatatgtaaaggatcttgattatgtttgatgtaggtgtgaaataggaatccagctttattttatctgtcacaacttggttgttcaaaagtcactaattgagtaatccattccttcccacctttttgtataataaaaatttcattttgtgtttgtgctatatatattttgttttattgacctattttgatgcaaatcatataaagtttttactgcagaaactttgtgatatattctaattacaattttggtaaggtaaatccaatatatttttctttttcaaaatattattattcttttttattttaaaggagctttataattaatgatgtttacaaacaaagtctttaagatagtttcattggacttatcaaatttgtagatcaattttggagaaaaatggcatcttcaaagtatttcttcttctaatttagaaagaggacactaacctgggtattccagataggcaattatatcctcagtaagaaattatgtctttagttcctatattaaatgttttgtttttatcaagctttattagctattactttaaaaatattaattaacagtagcaaaaatgactcttttcttgttcctgattttaatgagaattgcttcagcataaaatgatcatttattttaaattggtacattttaataagttaagaaattgtacttctgtttttaagtactaattgttaaacaaataaacaaattgtatataccaaagagaacatagcatattggtaagcatccatggaacattgacctttatattagtaaatgaaataactgtaaatattctgaaattctgagcatgttagaaaatagataaatggggaaaattcacattatctgaccataatgcaataactctagaaactaataagagattttaaaaaagaaacaaaaaagtgctgataaaacatttaaataaaggtcttgaaattttaagaaaagattggattacattgtaccaaattctacttcagcatctacccagatttttcttctttgatctagtaatgaatcatatctggaacaaataagacttagttactacgttatttttaaaagtaatactgaattaagtctgctactactattaatacagttattttacataagggaggttaattttctgttttctgctatttttgtcaggttttgaagtctgtttttattggctgtatttaacaatgggaagaaagttaactgttgccatgataatgctgtgttctccatcactcaattagcagtttaagtaacaccatttattatttatcatgagtctatggttgatgggatgttctgctgaactggatcaggtttgactcacctcagctgggcttgctcatcatctgtggtcaactggcaagtcacctaagatagctgatctgggataccttcagctgagataattcatccctctttcaaatgtgtytctgacatccttctttccaacaggmtagatcaggcacacatcctcacatgtcgtcaggggtccaataaagttaaaccatgcatgtgtcttttgaaacttgtttgcaattttttcattttttttttcatttgaaagtaatttttgtgagtacatagtaggtgtatatatttatggggtacatgagatgttttcatcacaggcatgcaatgtgaaatcagcacatcatggagaatgggatatcctttccctcaagcatttatcatttgagctacaaacaatccaatcacattcttagttattttaaaatatgcaatgaaattattattgattatattcaccctgttgtgttatcaaatagtaggtcttattcatttttttctgtagccattaaccatccccatctctagccacccgctactcttcccagcctctggtaaccatccttctctctctgtgactataagttcaattgttttgatttttagatcacaaataagtgagaacatgtgatgtttatctttctgcgcctggctcatttcattcaacataannnnnnnnnnnnnnnnnnnncgctactgtttcatttgctaagcgaataccatagccaagcccagagtcagtaatgggaaggcagtaggcattacaaaagggcatagataaggaaggtgtaaaaaaaaaaaaaaaaaaaaaaaaaaaaaaaatggggtcaataatacaatcaagccaccatttgaaacatcacttcttttatattctctgcaatctcttaaataatataggaattatctgttccatattacctttgcaagtcttcttaaagtcttgacacgtaaatcttctttaaaaatagcttttaaaattcattaacagaatttcattcctagacatttcttaatgagacaacttctttatagctgcgataatattttatttctacagttgtttattttctactcttaactggtcttataagaaacttgttcattttaccaatgttttaaaagaatccgttcttggatttatttatattagtgttatgttcctttttttctaatgtattcatttcttccttttgccttttgcttttatgtattccattctctatcttgcgaaataatgtattctaacctttccagcttcttgaatggaatacttagttcatttattttaattttgttgtgctcaataatgatatttttaattacttgaatatttcatctgagatcaatttggctttaccccataggtctgatatgtagtgtcagtatttctattttctaaatatgtgagatatcctttttaaatgaatttatatggtgaaaatccttatttaaatattttatcagtagttttaaaaatatatatctgttattaatttctagtattgcattgtggtcagataatgtgaactttcctatttattttgtaacatgctcagaatttcaaaatatttacatgtgttttgttgcaaatataaggtcaatgtttcatcaatatttaagagcatgctatattctctttgggatatccaatttgttttataatttgtaattcaattatattatttatgatatttttcatatacttaatttttcacctgttatcagttatagatgattagtgccattttaaattttttttactccacatgcaattttgtctatattttttctgtacttctctttgtctatatttctttgtttttctttgtatttctaagattttcacattgtatatttgtgctgctttttttagtgtacaaagttttatcaaatgtacttttataacattttgcatattgaataatttttctccaaattctattttatctaatataaccattgctatactggcttcttttttcttttttcattacaataggtaacacttattgacatctatagtgggacatgcataattactaaatttttttacatgcaataattcatttagccctcaagagaaccttataaggtatgattatcatcccatttactgagggttacagttgagtgaagcagagggaatttatgtaagttgttcaaagtcacaaaactagtaagcaactgagctgaaatttgaacccaagctctctgtctccaaactgaggttttggcaactatagtctgttgcttctttataaatatgctgcttggtcttgtaagaagtaagctatttttctctcttgttaaatttgctcagtcttttcagggctgtatgaagtctacaaatgagcccatcaaaggctctttttaaatgttactgtgattattattattattattattattattattatttgtaggatttccatttgattctattagagcctatctctctgctgaaatttcctatctggtcatgcatgttgtccacctttttaatagagccttcactgtattaatcatgattctttaaaatatcctgtgttttgattccagcatatggattatatctgcatctagttcagtgattaatttatgtcctaatagtgggtgttattttcttgcttttttatgtgtcttataacatttgaatgaaagacagacactatgtaaggacagcagagactgaggtaaatagtattaatgtgtggaaacaggcatgcctctcctgctgctagtttttttttagattatattttattttaagttccaggaaacgtgcaggatgtgcaggttggttacataggtaaacgtgtgctatgcaggtttgctgcacctatcaacccatcacctaggtattaggccccatatgcattagctatttatcccgatgctttccttcccccttcccccaccccacaggccccagtgtgtgtttttattggagatgggctgttaaatcaatccagtcaacagtcaatcttgatttacactgctgttgcttgttacactcagtgcaccacaggtttccaatcttctagtgaaatcttatgcttaggttaggtgttgggtcactaaagagaatttgtaacttttctcratactagattttcctgtgagcctgtgcctcagtgagtatattttttataccgttgcttctctctcaatggtagaatgccattacttgttattcacaccacttactagtctgcttgtgggtgtgtggggagttgttgccgggggacrggttgtggacagttcttaggcttaggcaggcagtgtgtccctggattggggatctggctttcttggtgatcctactcatcctcctcatggcagtcaaactttgtcttaaatgtttggcaggtctcatgcttgggggagattttaccccttttggaatggttgatttttttcttttaccytttacacagtttcattgagttttcacctgtttcctgagaaactatagcaaagctattaagctttgcttccccttccatagtgccttaaagcttttgttcaataagctatgtagggaagaaaaatctgggcaagggtttacccctttctcacaacagaaattgctcctcttctcaggcctgcaccactgagagaagttttctctgatctttcattctgcctccagtcttcgttgtaaacacatggtgaggtctgtgaaagatagcctgcaagttgggtggaaattgcctttgtgcctgtgaatcccagtagttctctactcttatgagtgtactcttacaccatatactatcatgcaagctctatactcatgcaagctcatacttggattaggcaatttattttaaaaattaaaatttccttacctgcagcggggcacggtggctcacacctgtgatcccagcactttgacaggctgaggcaggttgattgtttgaggccaggagttcgggatcagcctggccaacatggtgaaaccctatctctactaaaaatacaaaaattatctgggcatggtggtgcatgtctgtaatctcaggtactcaggaggctgaggcagaagaatcacttgataggagatgaaggttgcagtgagctgaaattgcaccactgcactccagcctggacgacagagtgagaccctgtctcaaacaaacaaacaaaaatttcttacctactttcatcaggacctcaatctcctttcatgctctactccagctgcatcagtacacatgtgcctctttgtccttggaggagcctgtctttccttacatttcaggctatgagatctacctgcaatcccagccctcgatgtggttaagaggagtgatgattttgtccattacagcttctttttttcttgttgagaaggaattaatgctctttccagacatctacatcctaagcaaagactggaaatctaatatataaaaatcaaactacctctgttaatgatatatgtgttttttttctaattaattcttgttttgttgttactgttgtgtgagtgcttgcatgcttatgttctctttcttgcaatgtatgtatttaccttcttttgtgacatagaacatatgaattttgtttttaatttctctagtgaatctgtttaagttgatttaacatgtacttaaattaatataccttaattatgaaaaacaatactacaacaatctgtttttctttgtgcatgaaaattaaggcacccctttacttcctcttcatatattctcttccaaaactatcataagagaaaatattagttaatagaaaatatatrtatatatagtcatccaaaatattatttttaggcctagcttcatatatgtaattgcttccaacttctcttccaatcattttatacttttatattctctattcttcagttctgtatttttattcatctcatagtcatctcagttaaattctcttgccaaagagtaagaaaaatatatatatgtgtgttgtattcattgtagtttgagaatgttttcctattgctttttctcatgaataacaatttggcattcttagttttttctttctaaaaatctgaagacatatatacattttcaactgacatctgctgctaaggagaaaaatactaaagctacgttttcataaaaatctgaaactagtgctatttttatttgtttgtaggtaatctgtttttgtgcttagacacatgtggaaaaatttttataactttggaattaaaaaataatcacaaggttaggtctaaaaataggcttttttaaaaaaatcaattttgcctgtgacttagtgagctcttttaatatataaactatcatacttgggttagaaaatttttcttccattatttctttgagtattgaatctattttcattgacctattatttttttctgaaaaatcttattttgkttttaaattatatttagagacaagagtcttgctctgtcactcagagtagagtgcagtggtgtaatcatagctcaccgtaacgttcaactcctgggctcaagcaatcctcccacctcagcctctaaaataactgggactaccacccagtcaaatgccaccacatttgactaatttttataaatgttttgtagagatagggttttgatatgttgcccaaactagtcttgaatttggggcctcgagtgatcctcccacctcaacctcccaaagccatgggattccaggtgtragccactgtacctaaccctcttctggaaaatcttaargccttagattgcattcctgtctttataggtcatatttctcattattctcttctttttgaccttttctttgcaacttgagagttttaaaagttcacttattgtgtaacttattcattagtcctgatatatcatttgcattctttactactcccaactgttatttttattctgcagtagaagtttgtctttattcttttttgttttcttttctcatattatctcatcttttatatcattaccttcctttcagcctattctctttgttggttctctactgatgtttcacctagattttcattgtttaaaggcattcatcagattatattgcaacatttttattgaatgcagccagaatttatgtgaggtatgtactacctctgagacttgagggtgatattctgatttgtttagggtgcaatgagtttttgtgtttgtttatgtttctataaaccatccaggcccaatctttatttttgtcaatagttaaagaaagtgaagcatcttttgcctcctctacaatccatttagttaagttcagtttttctttctcagacctagagttaaagatcaaatagatatgttcagcatttaatcaaatttaccatgcatagtaggtattccatgtataggtttttgacagagatttactaaagttatttggtctaattatgacagagcatttattccagacactgtcttgtttatactacttatcactcagtgactaaatcttccaaaacaaaaattattgtcatctcaccctctctacttccataaccttacggtggtttctgctttgagtagtagtctctggatatttgtgaaagagtgtaactgagaaggcagcaggtagtgaataagagaacaaagtctctggatactaataaagatagttctcatatagttcaggatagcttgctgcttacttggccataaagctcttacagcctaaagttaggcataatcaaaggaaatattgttgcgggaagtcagggaccccaaatggagggactggctgaagccatggcagaagaacatggattgtgaagatttcatggacatttattagttccccaaattaatacttttataatttcttatgcctgtctttactgcaatctctaaacataaattgtaaagatttcatggacactaaccacttccccaatcaatacccttgtgatttcctatgcctgtctttactttaatctcttaatcctgtcagctgaggaggatgtatattgcctcaggaccctgtaataattgcattaactgcacaaactgtacagcatgtgtgtttgagcaatatgaaatgtgggcaccttaaaaaaagaacaggataacagcaattgttcagggaataagagagataaccttaaactctgactgcctgtgagccgggtggaacagagccatatttctcttctttgaaaagcaaatgggagaaataatgctgaattctttttctcagcatggaacatccctgagaaagagaatgcgcacctggggataggtctctaaactggcacccctgggcatggtcatctcttatggtcgagactgcagaggtgagatagactccagtctcctatagcactcccaggcttattaggaagaggaaattcccgcctaataaattttggtcacactggttgatctctcaaaaccctgtctcctgataagatgttgtcaatgacaatggtgcctgaaacttcattagcaattttaatttcacctgggtcctgtggtcttgtgatcttgccctgcctccgcttgccttgtgatagtctattaccttgtaaagtacttgatgtctctgacccacacctattcacacactccctccccttttgaaaatccctaataaaaacttactggtttttgtggcttgtggggcatcatagaacctaccgacatgtgatgtctaccccggacgcccggctttaaaatttctctcttttgtactctgtccctttatttctcaagctggccgacgcttaaggaaaatagaaaagaacctacatgaatatcggggcaattcccygataaaatatattatatagggagactcaaagcatatttctaccttccctgtactaatttgaaaaagaatatatayggttgataaatatatatatatatttagaataagtattaagccccaatgttatgcatactcaaaggaattatacaacataaagagaatcaaartatatttctactytccttggactaattcgtcctgttctggttgtaagtatgggatatgaaatacatagatgaaatgtatgcttttgaatctatccccaatctcaatttagttgtttcaaattatttgagaatttctcatttatctttctctaacttgaattatggagcctgtggctttatttttttttttttaagtttttttttttttggtcagttgttgaaatttttaaacagatatttggaggaggtgtatcagagccagctagttttaagtctcagactggtcactcttaaaataatcccacccagtcatgccatcatcaaatttagttgcctctctccttggcttaaatttaatacattttttccccaatctattggactctttagaaatgttttaaacaaaaatgactaatttattttttaaatgtaattaattttgttgattgaataagaatgtttaaaaatgaaacattattgtgaaaattaccacatccttggtttaaaatagcctgagaaaggaaagcacagccataagaaataaatatacgaataggttaatacagaggaaattgtgccagacaaagctggttgcttttttgatagctttacagccttagtaaatgaacagagtggagtagacataatgcatcttgacttctagcaaagtactggagacaatgtcgtgtgaaattttgattgcaaaattaatttgagttggcttgaaaaacactgttaaaggaaatataagctggttgaaaagacatacagagaagagtgttgattaatgtcagtgaactaatgagttgagtgatatctccagttaaatgtcacgattgtgagtgttggattgaattatttttgttatctgttgaaaaaataaataacatagggttgattaaattagagcagaaaatttatcaggagacaccagtgattacagaaaatctatataaagacatgaattcatttcagagaaaaaccagtgaaacaatataattttacttaaagagtccatttttttaatcacaaaatggaattctatgaagtatcaatgcttaaagaccttcaaactacagaatttctcaaaactaaytggaaaacaaaattaactatctcagtaaggctagaacatcattttaatccagttagtagctacattttatcccaaccaataaagtgacagttaattcttacctagaggatgtggttaaatgtataattattatttaccagaaataaaaaaagtatctagaaaatcagtaacctctagaaactcttgggcacaggagagggagaaaactatggaaggggaagtaattatgttcttaactatgttacattcttaagttacattcttaactatggggatatagtaagactctaaataactaaagtttttttttattatactttaagttttagggtacatgtgcacaacatgcaggtttgttacatatgtatacatgtgctatgttggtgtactgcacccattaactcatcatttacattagatatatgtcctaatgctatctctccccactcccacctctccccacaacaggccccggtgtgtgatgttccccttcctgtgtccatgttatttttgaaatatccagattaaatgtagttaagtaaaacaataaactttttcaatgtaggttttttaatgctaatgaaaagctagtcagcatggggtaaattagattaaattagattaggtaaattggaataagaatcaaatgatcacaatcataaaatgggattagtcttactataagtcacacctgcaaaaggaagaagataacctggaaaaatttaaagagtcttccactttacgaagtcgtagtgagttggcaagttttaataatttaaaagaaaacgttgatttcatctaaaaagagagagagaaagttttagttattgattcaacatgtatttattgaataccttaaatgtgcactatttttggttttgtgagcagtcccaaacgattaaaacagagtgacttgttccctgactatcttaaattatcgcaaactgattggcttaaaacaacggaaatttattctctcacagttttggaggccaaaagttcacaagcaaggtatcagcagggctgcactccccctaaaggctttgggggagaatgattttgagcgtttcagcttctgttagctgtcagcattctttgatttgtggcaacatcactccaatctctgcctccatggccatgttgcctcctcttctgtctgacaaatctccctctaccatagtcttaaacaaacagttgtcattgggtttagtgcatattcatgtaatctagaacactctcccctctcaatacttaacataattatatctgcaaagatcctttttccaaataaagcaacgtttgtttccaaattttaggatttaatatctctgggtgaccatgatttaacctactacaaaagcattttctaacaagcagcttaaaataggtttcttttttctttgagacagggtcttgctctgttgtcaaggctggagtgcagtgsacagtcatggctcactgcagcatcacactcccagtttcaagcgatctttccacctcagcctcccaagtagtttagaggacaggtgcatgccaccacacacagctaatatttcatttttttgtagagacagggtctctctgtgttgaccaggctggtctaaaactcctgagatmtagcaatcctcctgccttggcctcccaaactgctgggattacaggtataagccactgtgccaggctcaaaattaggtttctattgctgcattaatatatacacagggccatctctttctcttctaattattttacaaatataaagagcatctgtaacacaatgaagctgttttccactttaggaaaagacagttttgaaaatgtgattaattatttgttgcaggttaggcttcatacagtcatattcccagtgcacattgtcctcaagatctccccagtttggcactgaagccttattgactctgtctctgaaagaggccttaaatgatcccccttccttctaatcctcactgaaattcccttaggttaagcccaatttatccaagggmtatggtcttctacttgatgttctgtttttaatccttgatgctatccttctccttccatacaaacagtagatacacatattttcaaaacacagactttcttgtgttctctacttaaaaatctgtctagctttcagatacataaaggaaaagcaacctggttttaagagcatgcaatgyttcttcttaaatttccgatccctgtccttgtctgcagatttatcacttaacattcctctccttgcttcataatactacacacacagacatacacacacacaaacacacacaaacacacacacacaaacacacacaaacacgcacacacaggcacacacacacacgcacacacaaacacgcacacagagacacacacacacacgcacacacacacacacgcacacacagttccttgatattgcagtcacacagaattgttcactgtttcttgaaaataatcataaactgcatttgctcatgttattttttgagatcagagtgttcttccctcttttttctgctttaaggttttctytttttttgcacagctattaaaacttggccaactattatattttctctatagttttccctgatccttacacatcttcatagctccttacatgtaactctattactgtgtgcatcatatgcgatcgtgtttattttccctgtgtgatttgttttttagactatgaccaccttgaagacagaactgggtcttatctatctttacatctcctagttgtttgcatggttcttgacacatagcaaatgctcataaacttctgatgaactaaattactgtaaattaaagtcattgatacatttaaatggcacgatttacctatatctgttttataatcatagttaacaaattaagcaaaatacttctaggaccaggaactcaatatggagacactccattgtaagagagaaagatgcattgaatcgtttattcagaaagaacttattatgtcactgtaggcactgcacaaaggctaaaaatcccaaaatagaattgttaaaaaattagggtttaagattaaaggcaaaggaaatcatatttgttgagactattagggttgcttgaagtaaactaatgccaagtttaagtaaaaagattcctgctatatgatataattgttaagcctaagagaccagcaggcaccaggtacagttacattcagatgctcaagcaatgccattagggaactgcccatgtttagccattactgtgttctgttattccttttttttttgttttgttttccctctcaggcagattctactcatgtggtaacaagactattattctagatactgtactcatatttaacagtctcagggaaagagtgaagccttttactcaatcgttccagaaaatatctaatggatgaagggaaggctctaactggccttcgttggaccacttacatttctttgaaccaattactctggtcagaagatgaacatgtctgatctttcaggattagattcacatgcaaaataatgttacaattcaaactaggaaaaataaattatatatttttaagagactggatgaaaatactccatacatcacatgtgcttttctttttctgtatattggtatatacataatcactatttctttttttttttttttttttttttggagatggagtcttgctgtgttgcccaggctggagcgcagtggcatgatcttggctcactgcaacttccgcctccaaggttcaagtgattcttctgcctcagcctcctgagtagctgggattacaggcacccaccaccacacccggctaatttttgtattcttagtagagacggggttttaccatgttggccaggctggtctcaaactcttgacctcatgatctgccagcctcggcctcccaaagtgctgggattacaggcgtgagccactgcccctgacccaccactatttcttttgtaattaaaaagtacatatacactttatattttgatgtagatgtaagaatagcctctgcttcaaagacctcattataatagtattaaagacacacaagtaaacaaaggtaacaataaaatagtaatacatatcaaatattaagtatctcaggaataattattccttctaaggaatggcaaagaaatttttcacaccacaaagttaattttgaattgggtcttcaaggaacataacaatttgaaaagacagagaggactttccaggaaaatgtaactacatatgcacaaatgacagtagggattatagtaakwacacttttattattattctacctcttcactctattcaatttccctgactactacaatgtccccatgttggtttctcctttcttgtattccaagatattgtgtcctgcttttgcttattattctctaccccttaagcttctcattgcttcctccttcttttctcttttttctgggcctccctctttgtttttacgatccctgggaggactcatttaattgactcctaaatggtttctgtgtctctagtgtcttgtagacattagaggcacagaaacctttttcactgtctattttccactcggcatccaaactaattttccataaacattgcttccatcatggatatgtgctttaatagcattggaatcagacagatcttaagcacaatacaatagtatatataccagataccagttatatgactgtgagaagatagtaacttctgagagtctcactactaatgcccaacttgtaagataattatgaaaatatgtacaacatatgtatcactctcagcagtgctagccactagatagatgtgcaatatataagtagataatacttttgtgggtatctatattactcctttgcccataaccaacagtgaaccatcatgttcctttttaagcttggtggtggatacaggtgttcactttaaaagtctcagtctcagatttcaagtcttcaacccatctcctaagctgtcagaggcctttacaatctttacctacctcctttattcagtcttatttcctatcatttccccacaggaactatttgctggccctttaatttctcccttacctcagaacttgctaatatttatcactcttaaatatatgtttttgcttgtgctgttcctcaaactagaatttttctgccatcttttgttatcctctctcttcttttagtttaaataccttctgttctctaagttttttttttccaggacaacctagaaaaaaatatctctttagtttctacagtggcagaaggtaatgtgatttaccaatttaattacttcatattacaatatagtgaccatttatatcagtgtatagtacaaatatgtatactgtggtcttactactgattatcttattcttatttattgcctctccaacaagatgttatcacccatagacaagaatcatattttatatatctttataacccaaagtgcctttttaaaattaatgtatcatgtttgttttcctggaacaggaactgaaatagagagtatgaattcatttgtaactgaatctttgctgtaatagttatccccagcatccttgctaatacagagaatgaagccttaatacctaaagcagccactgtrtgtgattaattaacttctctcctatgcatcttgacaggtagtggctatgtgccattcttgggagaactgggaaaatggtcactgaaatcatttttgttgtttctagttccaatgagaaatgccagcygggaaaggctgctacagtatgtagcaaggtgcttttgctgaaataataaaagtatttgcaaggaaatacttgaaataagtgctaaatttccaaagattgatctacactacagaaggcttattagggtatattgatactagtatgtgttgtcttaagtggtacattgtagtttccatgccaattcttgktttaaaacgcagcatgcatctgttatatgccactttccacttaaatgcctaagacaggtagattgcactgtcaagttaggtcattataactccaacagatgttgtcatgtagatgaagaaaattcattttaaatgatatcatttataaaatgtgtttttctttgtacctaaaaaaggcaataatatgtcatattagctcttcagattcaggttgcaatcagtatggcatgttttgattaaacacttcacaatttcaaaatcagtgcaggataatgatggagcacatgtgaggaaacagcaatagcaggggtgtttacagtatcccagttgtttcaagcttaataacacttcatgttatcaatcagttacaaaggaataattggtggataggctgaggaaatggtacagtaagaaattgtacttattctaaactatagggatggaagtgcagccaggtcaatacttatttggttagtatattgtaactaatcatttgagttttgccagctggtatcttatttttgcttatttgtttaaccgcttttaaataagtatataattttaacaatttaagtcagttgaaatcccccccatagagctctcctccaaatgcatccctagctacattcttctttctggagattaaccagaaattggtggtttcatcctgtttatatgaatacattcctagaagataaaatcatattgtagatatttgtgacaaaattttcctcacaactatatgaaagagaacgaaggaaggtgtgtggttaggagttagctgtcattaaaagtgtgtaaattttgcacgttccctacatttattttccagtaaattttactagtttctttctaatcagttgggactaaagtcaatcgacctgtctctgcttctttcaatttcatttcccaaaagaattttagtgcttctctattattcttaactctgccttgccccaatacattaatcaatgctttgggtaacaacattagatttgtacagggaaggaccagggaatggcattccaaagcaacacatggaaagggcaagagctgaatttcataaaccgtaacctaatccatcactgcagctttccgttgcctctacccagactgcagccaaacatactctaagctgccactttagagtatctttaccctccatgggagtttttctttttttccctttttttttttttttttgagacagaatctcactctatcgcccaggctgaagtgcagtacaggatcttgtctcgctgcaagctctgcctcccgggttcaagtgattctcctgcctcagcctcccgagtagctgggattacaggcactcaccaccacgcccggctaatttttgtatttttagtagagatggggtttcaccatgttggccaggctggtcttgaactcctgacctcataatctgcccacttcattttcccaaagtgctgggattacaggtgtgagccaccgcgcctggccaggagtttttcactgtgatgttgtgtaggtctctggaatgtatgtttccctctgcagtttccccagtgttgattttaagggaggaagccagagcacttgctatttcaccatcacacttgtttgaagtgtgagttaccatgcaatgtttaaaacatgagttacacctttttggaggatgctgtagaataccgatttattttttgtgtgaaaacaaactctacctcaggttaatcaaataattactgaagaaaaggtttttctttattcaaatatttcagcacatgaatgaagaagaaatggtaaaagtaaaacatgaacatttggccatcactaattatattagtttgtagaggctactgtaacaaaattccacagaccaagtggctgaaacgacaaaaatttgactgggagttcaaaagcaaggtgccagtggattgggttttccctgaggcctctctcttcagcttgcagatggccaacttttccctgtgtcctaacatggtcttctttgcacccgatggctctctttatggtctaatctcctcttcctgtaactacaacagtctgattagttttgggcccacccatatgatctcacttaaccataattatcttctttaaagaccctatcttcaaatgcattgtgaggtactgggggttagggcgtcaacacctaaatttggggaaacacaattcagctcattaaatgaatggaagtcatacctgaaatcaatgacggatcgtatgactacaaaaaaaggagacaaacattatacacctgctgtttaaagtatacaacacaaaattattgacaaatattaagctgaattaggtcaatcttctagatttaccaatttgcaaataatgcaatccacagagcaagatgtggatatgggggattcagacagcayaatctagctcgggaaactacagaaaaaaaaaatgacccattttgtgacatataattgaaggaacaaatgaagatagatgaatggagaacccrtaaataaagcaattcaagatacacatgaactcataaaacataggtcctaatttgagtaaagaaagaaaattttaatactgactggwtatttgatgacactgagaaactattctaactgtgcagctatgaaaaggaatgagatcatgtccttttcagggacgtggatgaagctggaagccattatcctcagcaaactaacacagaaacagaaaaccaaatgccacatgttctcacttataagtgggagctgaacaacgagaacacatggacacagaaaggggaacaacacacactggggccttccccggggtggagtgcagagagggagagcattaggaaaaataactaatgcatactgggcttaatacctgggtgatgggttgataagtgcagcaaaacacctttgcacacatttacctttgtaacaaacctgcacatcctgcacatgtacctgcacatgaactaaaaataaaaataaattattctaaatcttgggaagtatgataatggtgtcatgattatgttttaaaggacttcttaacttttagagatatataccagaatagaaataatattgtataatgtctgccatttgtttcaaatcaaatctgaccaaagtaggggcaagaaagagtaggcgcataaataaataactcattgataatgagttgataattgtttcagtaggatgatgaatatttgagtttataattttattctatttatatatwtgaaaatttttatactgaaaagttgaaaaagctytatattggtattttaaactttgtaaatgtkcactaaaagaagatatgtctttttagttgttttgcctgagttatgatgagctttgatgagtcaatcaggctgcctcttgagttttccttgtaaggttaattgggtgcactggagagctagctgaggttaggagagcaggctctggttgaaggacagggtttcggcttggcagactaactaccttctctgattattaaactttgatgccacccacattagcacagtattctagtcacctgtgataacctgtccagaagttgctctgatcgtgttcagctcaataagtttagacttcacacaatagtgcttgtcattttttaccctcttgtaccaaatatatttcaaaatatgtccaatccagctgttaatttgactgaataaaatattataataacacttctgaggattgagatgatgtttgaagtttttcaagagtcttttccctctggattagagaacatctctgccagaatcaaaatgagtctcaaaattgacagtttttactttacttsctacagtaacctggcattttaaaaagcattctggaaaaaaaaaatgaatcttctgattgtgtaataaaagaataagaatagaaactaagataaaatgattctacatgtatatcttgacttatgtctatattttataatttcaacttttacgtcaaaaaattgtaaaatgtcactaattttataaggtttaatttaacagatcaaagctcataggactttgttgaaaacaatgaatgcaaatcctcagtacagttccaggtgtgtcatgagccctccaaaaatgatagttacaatgactgtttcaaaaaatttataccttcaacaaaactttaatcctatttttatatgcctgtctgctctgaaaataatttaatatgtttaaattcctasaataawtcttactttaaccaaattaataattcttaaacttaaatttagatttcaatgaatccccaaaatggtttccacataaagtaatgcagctaatatcagcactgctaacagattacacagaaaggtctattataatgattgagtaaatattcctgggaaatcaaccttgttaaatctatatcctataaggaaaggtgcatatctgttttttctagtaaagattccgtaattgttattacaagttaatcagcttctcccaggttcatttactctggattttattaatttattacaggaaattattgggtaagtaaaccacaattataataaaatctcatacattttattatatggttcacaaactttataaacacctgtgatgggattctgctattgatatttaagtggatatttattaaggaactagagatacttctcagtaagattagcttagagaacggtcctgtttttgatctcttaagattccaaatttttattccaaattttctgatattgcccaagtgtcttttctgaatctatgtctttattatttggcttaaaacctttgtgcatctggtgctctattctgctgtgactttggagaaaggttacagtttgtttttgctgggaggaataacttcttgaatgatgtcccaactgaaaattatttttttggttggatagaacatccctgtacaaaacttcctctattatcccttggataattcctgctgtatatagaggtccaagattgattaatgattttatcttcagtaacctgtgatctaaattaccattggcaagacaagagtgatacctgtttttttattctctacattaataaaacatgccttaagaaatctatatacttcatatagaggatatgatttgccactaagcaaactctatgaaaaagaattgtgttttcatagtaaggctttattataaaccaaatatgaccaactttcagctaaactgtattatctaatcaagtttattccgtcactttacttgctattatcaataagacaagtaatatatttaaatatagaataagtaacaagcaacatgttaactgaattaatatattggtaaaatatagattttaaaagttttttgaaaatatttgaggagggttgcacttttgctccctctgattttactacgtatgtctctgactgtatgtaatcacacctagcttatgctgtcccttccattctctacacttgactttagaaagtcaaacgtagactggagcaaaaaggggagagatcttttcctaccatttagcagattaaaaggtagattggaaatgcatctcagtatctcagccataaatgtctaagggataataatcccgctacatatttattaaactaattacaacatattgcgcaaaataaaatactttgaatcagaatgacttatgaatggtcgattgcatacaaaagtgctggagatatggtgataaaaagatgattcagccatcacaaagctcaaaattctactgggagaaacaggtaaagtgactgaagcccaggataatatttcaaataataagtacagtgagatacttatttgagagatgcaaactcaacaacagtttggtaagtactttctctattctaatttgaatacattctagtcaattgagatacacaaagcatcaattctccccattggatttggatcccataaaactacccatttccccaaatagatagtgttttaacttaacagacctcataaaaagcttgacactaaaatgagaatttataaattgtgatctgtagtaagttaaatggtgcccaaccctgcgaaaaacaaaaagtatgtccatgaactaatccctggaacatgtaaatgtgatcaaatagggaaaagatatctttgcagatataattgtaaagaatttcaagatgagatygttatggaatatctgagtgggctccaaatctaatggcaagtatctttattagagaaagacatacggggatttaaaacagaaaaggaagaggagacagccatgtgaaaatggagacagagattgaagttatgcagccacaggtcaaagaatgcttggaaccaagagaagctggaaaagacaatgaaagattttcccctagagcctttggatagagccctgcaaatactttgatttcatatctgtcctctggaacttggagagaataattttttgatgtttaagcagatgactttggggcagtttgttatggcagccattgaaagcaagtcgtgatctagtttgccttattttccaaagcatagataattttcaatttcaattaggaaaattgaaattccacaaaatgcaagtgcatacagaaatgtctatctgagttgcagttgggaaacattttgcatttaaaaaggaaaagttttaagatataaaagaaagtcttgagaaaacaagagaatatccctcatatatgtacaacttcttactaatagaagccttagatgtctgatcaatttcagaggcaaaggctaccattgactgttcattgaccattgacaagccatgtgtttcaatgatgaaataccacataacaaaatactctaaagcatattgtcttaaaacaactgttttattactaaggttcctgcggatctgatattcaggcaggattcagtggggatagcttacctctgttctacatggcgctcactgggatagttcaattagggtaagaggattgaagatggtatcatttgcatgtctggggctttggtcctggctgttggctgaggtgctttagttacccttttctctccacatagcctctaattactcaatattctaccccagcctttaaaaaaaattttattgtggtaaaatacacatataaaatataccatcttaaacattttaagtgtacagttcaatgataataagtacatttatattcctttgcatccatcatcacccatctattttcaaaactcctttcatcatgcaaaactgaaactctatacttagtaaacaatgattccccatttccctctctgtccagcccgtggcaactgctattctttctgtttctatgattttgaccatttcaagaaacttatgttaagtggaatcataaggtatttgttattttgtgactgaytcatttcacttagcataatgtcctcaaggttcatccatgttgtagtatttctatcctttgtaaggctgactgataaggagagacttacttctgtcatttaaaaacttgttttctatatggcttatagcatttttgtcccttgcttcctgcgtgactgtcttcttttgtgtttagttgattattgtaatgaaatgtttatgtatctatgtcattgacttttgtatattttctatagctattacatttaacatcctacagttataacactcttatttagatttatgccagtttaactccaataatacacaaaactctctcttttacatttccatacccacttcttttggttgctgatgtcctaaaactacacctttacacattgcaggtccaaaaacaaaaactaataatttttaaatatatcagtttcttgaattaaaccattgttacaataatagtagcttttataattgtccatatacttacctttactgtgatayttatttcttcrtatatgacttcaaattattgtatagtgtatttttatttccatcttcagaactcacattaacgtttcttccagacaagtctagtgttaacaaactcctctcaacttttgtatacctagaaatgccttaatgtctcccttagtttgaaggaaatttttgccagatataggattcttgcttgacaggtttattttctcttagcactttgtatatattggcccatttctttatggtttccaaaatttctgataagatatatgcttataattttatcaaaaatcccttgtatgtgattaatcacttctcttttgatgtttttgatattctcttttttgtcttcatcatttcaaaggttgataatgtggatctctgagctcattgtatttagagtttactgagcttcttaaatgtttatattcatattctttgttatatttgggagttttggccattatggcttcaaatatcctctcttcttttctctgtcttcttatggactccataatgcatctgtttgtccacttgatggtgtaccaatggttccttattctctgttcacttttctttaatcttttttctttctgttccttggattgataattcccatggtcttctctttacatttgctgagtctttcttctggctgcttaaatctacctttgaaaatctctggcaaatttttttcatttcacttgtactttttagctacaaaatttctttctacttttaagttttctatctctttatggacgtttataatttattcatgtattatttcttgatttcctctacttttcttttagttctttgagcatctttattacagttgttttattacagttgtccagtaggtcccccatcatgtctttttcagtgacagtttctgttggcttattttattttatttttaaatgagccattctttcctgtttctttggatgccttataatttttttttgttgaaaattagacatgtgactgtagtaatgtagtaactccggcaatcagattgtacttatttctcctaggttttcctaggagaaatttcctaggttttccccttttgttctaaatgttgtagactagactgtctctgtgcaaaggatcaatctgagatgtacgtaaatttaaggtcttctcaagtctcttttgagcctgcacctttccctgggcatacacagcaactttctaatttcccgtgtgtatgtggttgcttttaaatgtcttagtatttaatgtctacctccaaaaagaggaaaagagaaaaatgaaggtggcaagcaggcactggccatttaaatcccctggaaattacttcagccagaggggtaggggtgtgcaacaatggaggggaggtgcaacaacagtgactacctagcccttcgtctacaagtccgtgattagaagcagcagtaagcaatcagagcacagatctccaatatttggattataacattccttttgcccatgctggcttttgtgaactgcatgtaagttgctcctgaaacatattcatggctgcctgccattggactaagggtcaggataggtagctgctactgttttaagagcttaaattgatcaaaagtaaccataattttccttataagctttccactggaagtttcaagccttcaatagactccagaactccagaatatttatatcagatagattctgccagtgcagttgttgcctacatggggagacagatttctggtgctttctattttgccagcttcccaaaatcttcctttctaatcttgtttctctccttgaaagctggggagaaccagctgtaattctaatttttgttgttagtggactatggctgtgagaaatgtcctctggatggggatgccactaccccctacacagctcacatctcactcacaactttggttttcccctgctctggaccagcctttttttatttctttatttctttttcacttgattggcttccaaaaatgagaagagaaaacctgtgagatctcttaagattcatgccaccaaatcatatgtcatcacttctgccacattttactggagaaaactcacagagcaaactcagattcaagaaaaggggctgtcttagaccttttgagcttctataataaaataccttagtttgggtaattcataaatagtagtaatttatttctcagagttctagaggctgagaagtcaaggcatcagcagattcaatacctggtgaaggcttgctctctgcttcgtagacggcacatcttgcagaaggggtgaacagtatcctcacatggccaaaggggaaggcaacttccttcagttcattttataagggagctaatcctattcatgagggaagaaccctcgtgaattaatcaccttcttaaatctttaatacaattgagttccaacatatgaattttggagcgcaacaatattagggaagtggactccatctcttgaaagaagaatggtatgtgtgcacagggataggaggaattatctgtggccatcttgcaggcagactaccacacagtgctctgctttttcttatcattttctttgatgacatctgatcctttctcacaaatatctcctttgtaaaacactcagcacttattatttatatcagtcatttgggaattagtcatatgctgcctagtggaatttgttgtcattaaaaatttwttcctgttttgtcatttcaaaaacaatcacaaactcttggaggttaaagatgatgttmtatatttccttgtaccccgtaaaaccagcatagtaggtatttaataaataactgtcttcttaattataaattttaagtggtgggagaatgatgtatttacactaatgcacggtggttgtattattatccactagattgtttcttgctgcatatcatgcactgcattatttcttgctgcatatcaatcacttagtactgacctyctttttaaaatacgcctgactttctcatgcttatcttacatatatggttatagctaagagttgtgaatggacacagatatgggaagcatatttaggaggattaacaaaagagtaattagaagaacacataaatccacaaggaaaaaatgactctttttgaagtatgctagcattttcaacatgcctgttgagttaatgatttatgggagtttcaattgtttaaatgtttggaatactctgcaataaaataaaaattctcttcaaagttgataaaaatactcagaggcatacttcctcatctgatgattcatagttaccaatgaaacccaagaactccatgcacattttcakcaagagcaaggcatctgatagcaagagagctggaaaggaagaatcatacagtgacctagacaagtgtcatgtcggtcttagcatcagataaactgattgcaatggttgattgtactatctctagcgagagtaatttagaaaacctgaataagaaaccctctcttgttcatcatagggatgactcttggtgtgaacccaatcatattaaacaattgtagaatcaccaagctagacattttatgagactaactgatttattcctcatcttgaaataaaacctgcatgccacaaaactcctctatgctgctgagacttagttctttctttgagaaaaataagagccatttattcatgcaataaattttcattgtgtgtgaattgtatactaggcctgttccatgtgcttgccatacgtcagtgaatagaagaggcaaagatctttgcctatggaacttgcagtctagtaggggacataagttatttcgtaagcttcccctttataaatatcattaatccttactaataataatacttacatcaatgtttatatattttacattggttttctgataatataaaaaaaaattcacaaaataaacccaaccactaataagctgtgagttttgagtgtagaattcttttcattaacaaaccatttcattttcagatcgagaaactaaggtttttaaaaaactgattttactgaaaataaaatctaaccacccatcctaatgttctttacttctttatctgtctttcaaaaatatcttcctttctctatgttgagttagatatgtattcacaaaatctaccatactgtccatatatgttagatataaatttttgagctcatgtgaaagaaaccaagtttgaatagttgaagcaaaacagaagggtttattattaaaaaaaaaatgtgttttctcaaggaccccaaaacacaaagctgaacttgagaagtgagcgctcaaaactattaaggctgtctgcatgacccttgctctaattcctctctgaaatagtgtctcattgattgaggtaaaaaatgacagcagtttctagagctacactgcctgtgttcaaatcctagctatgtcatttgttagctgagtagcctggaacaggtaaattaatccctctaattctcaatttccacatctgttaaaattagcataattataatcatatcaggataattctgacaggattatagcaaaaaaagattaaataatatctaatgactggcacaatacctgcctcataaatataagtcttcagtaaatataaaccaccattattaaataggagatgttaagaattgagctgagctggggagggctgagctgccagatgtgggagtattcagtaagacaacaagccaaaatgaaagtaacgattaagcttttattccacttactgtgatagtataatcaagagtccagaaagaaagtgccagcttcacctgtgtttcattttccctacaaatggcaccacgcaagggtcagatgcattagtacagttttggataactgtcttactgctcagggaaccccaaacaaaaagttcctatggttttatggacctaagggcaggagaagaagcaaggggaagatctaggaatgggaaagtaccaagtactaagtcagaatggagaaaagtgtcctccagggtacccactcctcccaacaagcaggtcttggcagaggctcctggaaaggttcatctcagagtccccagtaaagaagcctctgaatggaggctcctgggctaagaatgcaaatatgtataaaacatggctggccaggggtcctaagtccttgactgcaactcccgtcagacactgcagcacattgtctgtgcaagtcagtttggggagggaagctttcctctgtgaaggcctcccaggcaaagcctttgtattgcctagggcagggcaaaatcatacagaggtttttgacttggagctggattccttgagaggatttctaggagaaatcctcccaaaagtttcaacagtttatatttcatttgtatgttggtggttctctttcaagtgagatataatatagatgaaaagtatctaacatagattaggtattactcttattattactatagctatggttgcttgtatataactgttcagattatagctccaataaaacaacttattttattctctccagagttaggtaatatcattattcctcatactgaaggcttttgaaaaatgttccttggtctttactatacagagtttaacctttctgctctcaggaagaaagacagttggaaattcaccatctaaatttaaaagggggaaaaatctcagctgatagctggtaacacagtgttggctatgtattgagatacttacttaaagcatcatataagaaatgatgtacaggccaggcgcggtggctgatgcttgtaatcccagcactttgggaggccaaggtgggtggatcacctgaggtcaggagtttgagaccagcctggccaacacagtggaaccccatctctactaaaaatacaaaaattagccaggtatggtggtgtgtgcctgtaatcccaactactcggcaggctgaggcaagagaatcgcttgaacctgggaggccgaggccgaagtgagccgagataatgccactgcactccagtctgggcaacagagcaagactctgtctcaaaaaaaaaaaaaaaaagaaagaaatgatgtacaatcactttaatgtgtattaaggttcttgtttaaaaatcatctaaatttgtttagtatccaataaaaattgaagtctcactttgtgccaataattatgtatttaataaatgggaagaggaaacaaaacagtaatttttcttgaacacgtggaaatttatagataattgctgcaataaatattatcatwcaaaatatatatttaaaaaacttaactacaatattactgtaaaagagaggaacatgattctatattacagtgatatgaggtagcctggggtgggggcaggagatcaaggagagtttaccccaaactacaggtgtttatattgagatctaaaggatgaggaaaaattactttactaattcattaaagaattgcaggtgtcttaagattgttccagtcaaggaaaactgtatattcaaaaccactgattctcacatttggctctactttggaatcatcttcataactttacacaatactgatgcctagatttcatgcccagattctgatttcattggcatggggtgtggctttggtgtcgggatctttttttataactcccctagcggttctgataagctttagtcagtgctttagaaacaatgtttaaattttcaaggtaggagggttatgccttactcaagaaaccgtaggaagactcatatgatttgaattcaaagaatgagagggaaggcattatgacatgaatygatgaatataaataataacaaatcatgcaaattctggtaggccacatccaaagtttggcctttatcttgagaatactggaaaactatggaaagactttaagcagatgttataatctcagaatttatgtttgcaaagaaagactgtaaagagaagctatgaaattagcttcggctaggatggtaggaaggaacgagttaaatagattcaggagacatttttaaagaggtgaaattggcagagctgggcaaaggattggatctgagaggtggtgagactgacagcttgatttttggctagtgggactgagctgatagtagggatagatagtgagcttaatcttagagatatctgagctccctttgaggtatctaagcagagacagtgaagtgatagtgaaatataaggagattgctgagcttgagatttttattgtttaggagtaaagatctaaattgcaatagagatgctttacactaaccttgtcagtttcataaaaattactttactggtacaaaacatggtaaaaggcactgtaatagacagaaaaatgattcagatggtacccatgaccttaagtggttaattatttaatggaggagataggaaagacagtgagaatttaatgtgattttaaaatgaacatcttaaaatgtctcaaggtagaatggaatagaagagaagaaaatccagcaacttttatcaggttgtaataattaaatgctaaaatattattagaaaaaataataatattgtgatctgatagaaaaggaaagctaatagaatttgagggaggggaatgaccccgaagaatcatgaaaactctcagggatacaacatcatattaggacacggtgtctagttggaaacattttggtttttcattcagcttgaactggagaaccaaaaagaaagaagaataaagaggacagcaggagttttaaatcatggatttgtttattcaaatctgccaygtaccaatacaacaatactatgataagagctaggagtacaactgtggacaaggtagtcatcattctggcacatagtttataggttcatatcatatttattataaaaaatagtttacttgagacaatatccctagttagctttcacaaaggaaaccagtcaaaataatgactttattaaaagaggttaagtagccattctatgagtttgcattccctgtgtgttgaagcaagtttttttttttcttttttttttctttttttgagacagtcttgctctgttgcctaggctggagtgcagtggcaccctcggctcacggcaacctccatctcccaggttcaagcaattctcccgcctcagccccccaagtagctgggattacaggcatgtgccaccacacctggctgatttttgtatttttagtagagacggggtttcaccatgttggccaggctggtcttgaactcctgaccttaggtgatctacccgccttggcctcccaaagtgttgggactacaggcgtgagccaccgcacccagcctgaagcaagttttagggcagtggttttcaaccttggctatacattggaattacctggaaaggcttttaaactactgatgccttggttatactcctggggattctgacttaattgtcctggggtttggatggagcatcagaattttttaaagctttccattctaatagtcaacaaaatattctaatagtcaacaaaagttgaaagccacagttttaagggcatgttttatcactcagactactaagtcacccgaaaaatgagactgagcaaggaacaaaagaattctgattatataggaaaaataataacaaacatttctttagtctcagtgtgtcatgaacacttctaaacacttaacatattttaaatcagttagtggtcccaaaaactgtatgaggaagtcacttttactattcgcatttgagagatgagaaaactgaaacccaacagcacacgcaaagtaagtgttagaacaggtacttgaactcaatcagtcttcttctagagcttcttatctgaactggtatgctatattgcctctaaatgtagtgtaatggtaattttataccagaagaattataaaagaaaggaaaacctataaaaataggatatcattaaatcagttaaatgctagttgataatagagtgattattatgactgcataaaacatctatgggttatacatatgtgtatatagacatatatatgtatatatttattcaaatatgtctatatatagatatatgtatacatatttgtatatatatgtgtgtgtatatatatgctggttctcatgttttcttcatttgtaggaatcagttaacaagttcttgttacatagtatgaaggttctgttttcagtagtgaaacagggagataaaagtggttgaaccatgtgattttttttctgacttttcaaagacattttctcctgaaggaagctcaagtgctaaggctattccacataatctcaagaacgactactactttatagtaatgaccaaactgtagtaatagaatcttaggagcatataatcatcctctagggaacacattttacaaattgaacctatcttgcaggtggaaataccataaagaaaatkatcattggagagattactggcacactgcattcattcacatgtcaaagtggaaaacattccaatttacttctataaaacatgtatctgagtcaacctgccatatgtattttttacactttctatccccttacagaatatctaccaaataaatgctgcacatttctaagtggctggcttttaagctgctttgcctatggctttttgttccctctttttctcagctgagaaatcaagtaaacaaaacattgtggctggtagcataggtcctcagtgcagtggatattttgtgtccggcagctggagcattggtcgtacagatgggcttcatttgttccatatgaatacaagttaataaatggagagaattccatttggtattcaattaagatctcccctgactcctgttattaaagcctacaaactattgagcataaaattaaaatcgagcagttcagctctttttgacattataacactgcctgaaaaataatgtaaaacccaagagtcacaagtcattccttacagcccatggcaaataagaagtggaaacattgaggaagaaagagtaaatatttaaaacttgatcattagtacacatgttaggagcaggctactgtgctcatgcaaatacatcaatccagtttgttgaacacaagatattacattaattttaacagaatgttacaagattattattgccaaagctccaatgaaggaaataattaaagcactaggcattttaaggtcttaaaatgacagaaaatactataggaaatcaataaccagaaaatactatagaaaatcaatatactgtaattgaaaggaaattgaattgggtttactttttttatcccgtctaaattttcttcagattgccagaccactgaagatagtgaatcttgttttgccatcagcagtgtgactttctctaagtctcatgtgctgcaagggccatctttattgttttttatttaggaagcactcagctgaatagacagtatgagattttgtgtgtgtgttctctttactagtcttggactcattgttaaaaaaaacagaaacaaaatcaaagacacagcagacaaaaacaaccacctccacataaccagagaagtcaaattaatgagaattcagacatcgaaaccagaggacttgttagataagcctcacacttgaacctaagtgaaattcttctagtttttatcaaacactatgcctgtcattcttgctatgcaataagaaacattaccagttgcagatacaaattcaatttgaatctatatgaatctaactcattttcattgcttattattttaaaaagttattataatcaaacaaaaaagcttgaaatgaacctcagggaggtaagtggatatgaacagaaattaaagaatgttaaaatgagaaatccagactgggtgctgtggcttaaacctataatcccagcattttgggaggctgaggtgggagaatcccttgagcccaggagtataaaacaaaacacttaacaattctgagtctcaatgtcgttgactataaagtagaaatatcttcccttcctaccttaaatagatcacatttatgaaaaagattcataagttataaaacaacacctcaatgaaaaatgctgtatctggactttaaaaagaagtgaattaaatactaattttacctcttagtatatatgtgatcttaatgaagtccttagttttcttgtctgttaaataataatggtaagggcaccttctcatatggtcattgtgaagcttacatgtataaaaagctcagtaccatggctgacacatagaaagtatttaacagtgttcaaaaacataatcaatataggaaataagtattattttatttccttaataatttcttagttataccccattatcatatgtgataagagaatgtactttatttctagttttccagataatctgtatcctaaacattctttactcccaaattcagtctttgagcatcctaactcttgacatccacagctaatatttaggaaacattaaaatttgtttgtacatttgaaggaagaactaagtaaatggaacttaccaatcctaaaatccagactgctgttattaagaagaagaacaactgtacaaatgctgttaycaaaggatgtatgagtcaggcggaaaaaaaaggagaacacagaaaggtgaaaagtctttgtcaagcagaggagagaaattattgtcttgtaatatatatgagagagtctagccaaatattaaacatttttaaaatgaaaagaaatattatacatggtatgaataatatttaagtcattgcctaggttagaagattagatatatttacctattctacctacttcaaatgcttttttgctgtcattgtttggaacctccaaatactagaatgctttagaattataaaaccattgaccatgttcagttatgtttaaaagaaaacatcattctgaggaaactggaaattatatatttataaatgtttgtccatagcattgttgaaacaaatggctcaggtttcactgttaatccagttgctgatatttttgactactcaatacaccaaaatggtacagtcaagttggtgctaatagatgtcatttatttacacaaactgacaataggttcaccaaasttaagagacgaatttaagggggacagaaaagaaattcctgtgtgtgctttggcagcttagacatacttaccacgaacaagattatatcttaaaagctattcgttaagcttaaaattaagttatatggttgtaatatgtggagawagcacattggaatagctcttcacttaatgttatagatcactttttccaccaatattatttggtctaggaaagtaaaatcctcttgaggaagtaattagaaaaagcacacatcagggaatgtaattgaagatagacttttgttgacctcagaagagaaaagctcaaaagaaatttcgtaaagttttaaatatggcaagaggaccacaatgtctttgataattagactttcaacacatttggatttgctaattggatctaagttctaattaggctttttatgtaactaagaatgacatatcattgtatgaatttaatgtgcttttacagttgaaactaacaattagcagccttttccaaattattttaataaggaaaaagctggctctgctgtttatactgtgacattcccttctcttaagatatattatgtacattttcattttytwaattaaacaccttttggggagcttaaagggaaacttgggttttaataggaagcacctaaattgtttatttgtgggggagacttgccagccagtatgtagatgactttggaagctacagacaaaccgcaataaaaagaaataaatcacaatcatcaggaggaaacagcacaaataaccatttgcccctatgaccattcagttaatcaaaacagtctctgaatatgatgaaagatctgttacatttttaagtgtgcacatgcggaatatgttcccaaatgtgaaggctcatggatctgctttcaggatgaataataggaaatttyttctcaagatgtgcattacaacattctctctctctgtagccttgttctgtamacagttatctgctaattcaagtcaaatcatctctttctttctccatatttttgattgagagtcatcaatttttatcccattcagatatatagacagtaatttaaaaactggtrgccctcagatttgtacattccaagagataagacctatataacagcataaaattaaactactatttgggtgagtaaagagcagtgagtcattgcaagactttaagggaaaggctgctgccaaaatattccaagcaaattgataacactgccaaaaaggcaaattatattgttttatgtgctatgaatactttgaaaacaaagacatacacatgatttttttcaaataaaagcagttgcccttctaaccatattaaaaatagtgtcttttttcccagtaaaagccatataagatcaaattaaaaccattgaaactattagagaatctaacttacagtaattgatatattaaaaaagacattatgttagagttatatgtgctattatttttccaattagtacattactgggactgagtgattggtgtatacataagtcctcattaagtaaaatgtcctcaatgagcctcctaaagcacattgggtactgtcatgtgccatataatgatatttaagagcaagaaatggcatatctaataacttcatttcctatttaaaaagaaaacctgtgcagtactctttccataccaattattctaagagctatcacatagttctccataaagactatacagaggtgatgggactgttcttcaggcagaaaaatgaccaaagttgtcttatctttcagcttggktgctggaatcctgtcacaggtctgaatgggtcactgactgacaagaaattggagaataacatgcgtggagtggttctacgtgtagtaactgttctggtaagtattatctgagcctcgtggttttgacttttggaggttactttatcctatatttctttctttattaactgatgacataatcttaaaagagattttaacaaattctaaatacgctttctaagattttttaatggtcatatttcacagccttcaatttacgtggatcaggatcacagttttgcagacttttaactacagtgtatgtgttaggaattttcttagaaattttaggctcaatttccatcctacagttttctacacatgacaaagtaaaggtatgtctcaggccttctttcattaaaactgtagtgaacatagatagtcaacatatagtgaacattgaaactataaatgaacataaccctgaccatgccaaacaatggtagatttggtaaaatgtacattctctaatagtgaaatattaacaaactaagaatctttttctcgtaagaacctacttcaaagggaagctgttgtttaataggcatctactgtcgactgtattccaggctcagtgctgattactgagaacattgacaaataaaatgacagatataattctgtcttgatagaacttatcatctagtgattctgtgaatgttgaataggattacagtagtttccctttatctgtgggggatgcattccaagacccccagtggatgcctgaaactgtggatagttttgttttcttccaacacaatcacattgtgtagggcttataggttatagagtgtggatatgctggacaaagggatgagtcacatccagggcatgtcagtgggatggtgtgagatttcatcatgctacttagaacaatgttaaattcaaaacttataaattgtttatttctggaagttttcatttaatattttttggaccatggctgattgaggagtaaccgaaactggtgaaagagcaaccatggataagaagagtctactgtatacctgggaaagatctgttacaatttcatttacttattaaaaagtcaataaatggtaactgttataattctatacattatagttttctttcctaatagatacatacaataagatgttaatagaaatattcttaaacagtaaaatactcaaatgggctctgtctaaatagccataaaccacgaaggcatacattctcctttgctattccaatgtgtttaatcatgtgctagtttatagcctgtttcaaaacgtaatagtccatagttagtactttatttttcttcagaaaagtctacttgtttttaattttgaaaaagattttcctatgggctaggtaaattgcagaattagtaaataggagaggaagactttttgatacgttgatgctaattggatgttcatcaaattttataacaccagttgctgccctttgtacattgtttactacaaattaaatatatgcaatgtaattttattgtcaaaaaagtggatttgtgcatattttctatgaaaggacattcaagtgagtgacctattcttctttttttgtggcccataaattattcctagttattatttttaaaagggcttaattgcttttggtaaataattgtaagtatttcacaacttaaatgtgaattcgcttctgtatgtacctaagggtattgatatgcatttacattgatgcactaatattaaaaaagacagatatttaaagtacagcaaattattaatagtctttcctccagtgattagcatgaaaactccagtgatgattgcagtgaaagacggtatatgtgctttgttttcctttgagaaaagaaagcaaatctttaagtccaattaacctcagtcagttttaagcaaatagttatttcgcaattactatatgatagactcagtaatggatataagagaaataatatacagaccttgtcctcaaagtattcatagaatcttgttaggttgatgcacatagagaaaaacagctcagattgattaaatatggttgacccttggtgtctgtgaggcattggttccaggaaacccccacaccaaaatctgcaaattcttaagtttctgatataaaatgatatagtatttgcatataacctatgtacctcctctcatatgctttaaagcattttagattactcttaatacctaatacagtgtaaatgctatgtaagtagtggctctaccgaattatatatttatttttgktatttttattgggtttttttcctaatatttttgagcctcagtttgttgaatctatggagttgagtctagatgmagaacctgtggatatggagtgttaactgtacttactatgtgcaagctactctactaagtcttttgcatgtattgtcttattttgtcctcacaatattctcaagaaataggtaatattctgatctcaagaggaaactgagacatccagaagttgaaatacatacatgtatgtgtgtgtgwatatatatatatatatatcttatcattaagggaaggggttaaggtctagaatcagacttcctgaatttgaatcctaactctgctacttactatctgtataatgttcataaatacatgaacctagaagaaattgaagaataacatgcaaggagcgattctacgtgtggtaactgctctggtaagtattacctgagccttgtggttttacagacagtaagtagcagagttaggattcaaattcaggaagacagattctagacgttaaccccttccctcttaatgatacattatactgtctccagtcctactgtgataagtgtgagaactgaggtgtctatagaattttgtttgacttgagagttgaaaatgcttacgtctgaatraggtgaaagtgagttttattgggaaggattgtaggtacaatcatgttaaattcatttccaggctgaataaaacaattgctattttgttcatgaaatagtagcacttcacacagtgttaacacctgcataccccaggttcaccttcatgactcttaataatctctatttcctgcaagcttagccctgcacagatattgaatatggttttgtgactggagacatggaagcagtgtttttttttttttttttcaagtcttctatgatggacttatcagttgggtgccagttgagtaacaggttgttatacttattacattactacaatatacaatcattgtgtttaataattttgcatgcttcctatgtctttctgtaactactctgagaatggaaaccagtcattcccttcttatttattttctacaagtgccttttcaggtctagctcttagttatatggccttgcaagcttcttctactcaacactgagaaccactctcccctcaccccacccagcaactcccgaatcttgaggctttacctcactaaaccctgaaactaggatttaatctatactcaacttgatgttgtcacctaaacgcaacctcccacccccttatattccaagtatttacgtccaacactttccagaagagaaaagggaaaggaccaatgtgtacatgggaagaagctatttcctcctttcttctattgaaactgaaatctagtcttagctctacccactccctcttttcttaagaaattttatattatcaattacaccaggttaataaaatggatttttcttaccaaaattttgaaattcccattcttatgactgttgatattttattgacttgaaagaaataacttcatatttattttaaactacacaattcagcactctactgtttgtgatcccatgggcaaataagtggtgctctcaaacatttcattgaagagttaaatagaggtattattgacgaagatgtaaatagtgttaaaggaatcaacaaggagtgttgaatcaccagaacctacctagatgacttacatgaagactgataaggcatgggaggaagcattattactagacaaagcaatagagccatgggagagagaccatcactcatagtagtagtgagctacagtgcagaaaaagaaagagaatcactgccaataccaaaatcaggctatgaggaactgggaataagggatacactgatctcactcctcttatctatctcttttcatggtctccaactgcaaatccaaccagaagtcagaggttatgggagcctaagtaaggaagaccatgaaagttagtctttcaggacacagaggaaggcagtgaagccctcagtgaatccagaagaaaagtagagaaaaaccaacacgagcatctaccatttgataggacctattataagaaggttatatatattaacttatttaatccttataaaatttcatatgagtggcactaattacattataaggataaaaatagggtacataagagttaactaaatttctgcctccatatagctagcaggagccagacataaatttcaagatcagagatcctggttccacaaaccatgtccttagccactctgataatctkccttctgaatcagaatggactcatgttaggtataaatgaaatttgatataattattgagatgtgaggattgcatatgttggattgataacttaggagaattttcctaaatttcttcatatatagatttctttgtattcaaccatcaccaaagccacagaaatatgtyttagaaatggaggaaaagaaagaatgataataaaagcagtctctactacttggtgtctcttctaatctctttgtttccataatttgcccactgatctttacttcttaccaagtggtccaagtgtattactacaaaggaattatgaagattttcccgtttttaacttcctgarttatgcaatgtagatagcaataaatgaccaattaagtcattcaattgttttcatggtaattcatgaaaacactattggaaacattactgagttataaacataatcataatatatatgataataaaatggaaaggaattggttacaaattaaaagaaaggcgtgcgaagctatgctgcaacaagtataagatatctgagaaccataaattggcatttgggaggagctcactgattagtaattcttatttacctactttgattggccttaaaaaagacatatacattcctaataaacatacattcactcatgaattcacacaaaacagtcaaagatcctgactttagagagtttttttgttgtktgtttwtattgagacaggctctcactcyttcacccaggctggagtacagtggcatgatcatggctcactggagcttcaaactcctgggctcaagaaatcctcccacctcagcctcctgagtagctgggactacaggtgcatgccaccgtgcctgactaatttatttttcgtagagacaggggctcgctatgttgcccaagctggtcttgaactcctggcctcaagtaatcctcccaaagtattgggattacaggtatgagccaccgcacccatccagggagtttgattcttgcaagatatcttctaaagctctcaaaatagtcttgaaaaactgcagtgcagttgttctccattaaatacacaatagagcatttttttgcctagaattaccataaaaataattcaatatataaattgaattcatatataaatatatgactggaagtctatagtaaagactgtgatagtgatttttctgcattttataaattaaaaaacatagtttttcatattttaatctctctaaaattaggatgcatccttcaacttctatttgcaattgtaattagcaccatgtttgtctttattagtgatgtgtaaaatagttgcacatcttacaataggaaacattttagattaaataatgtatggtatttttacaaattaagttaatggatattcctggaaagttaagttaaacgtcactgggcaagaagccacataaagagaataactattttaaagaatacctccaaaagaaaaggcagtaggaaatataccaattagaaaacataggacagtaatagcaatgagaaaaattactgtctaaattaaaactgttgcctcaatcatagaaggatatacacagaaataggaaatacacagagatagcttatcttgaatcattaccacaaagcaatatccaaaatatctattgagagaatggtaggtttttctaagcaactcaccaaaggaaggattgtttgcctggctgcagcagacagccacctactgagttatcattttgagtaatttctttttcctaaaaaatatccatcattagtctcactttttggaatttctttttttttttttakggagattgtgactgatatatgggcaccagagtcttaatttgtacaaaaacaaaaaaaaagtatttaggttagatttagttatttatatacatcagcatgaagtaaagcaatgtacttaatttcctcttaatataccttttaacaaaggaataaataatatataattcattttttattcaaagtacttcacacaattttgttgcctttatttcaccaagtctcctctatttaatacacctatgctaagaagctttggcacacactgcaaaaagcactsaacttgcagtcaaaaggtatgacttttagtatcgtactagtttttctgcttaattgatctttgaatttatggaaaccaagacgctgttctgaacttcaatttttccatctgtaaaacaggaataataaaaccaatcacaaagggttactactatattaactggatgaaactatgtgaaagcaggtagcaaaatgaacagtgyttctacatacattatctctgcagtaaaactatgatgtgtaaactcagtaaagaaaaaaaagcatgagtgatcataaaagtctaattattcattgtcatcaaacttcagatttttgtgggagattggaggactctaagggagacaaacaaatgtaaactgcagaataatgagttttaggccccgtcactgttacctcaatttgaaaacctgctaatgaggaccacaggaactcttctgccagtgaagctggtacttcctagaggaaaaatgcacaaaaaacacctaccaccgaaaacaaaagcaccctgaattatgattttcaaaaatatctagaagtttatatatcaattatwttatctcatataaactgtgtttgattccaggctagctttaaatagactctatattttaatatataactaaacaaatgcctccagtgatagttctgaaacgtcattgtccttaaattttttgctaaggacattgtccaagtgtttgctacttagagactttcagaattttcatcgctacctcaaagttcaagcttttctgaggtcccagcgtttgagcctcttgaacctggaggcaaggttaggggttgggaaagtaaacttgtcaagagactctactgggcaagccctcacagcaaggagttgggaagagagctgacagcaagctctggtggctcccacagcaatgtcttacgagggctccttcggaggagttaataaataataaagtttggttcaggactccaggcaagaatgacaactctggctgaggaaatttccaggggctgatatctaaartaaacttaaagtcacaataaaatatgataagtgccatgtaataatcctacaatggaaatacacaggatagcattgtggttaagaacacagttccyacagtttcacttctggggtggcaaatgaggagttccatggacccactccccagcaaaataagcagagatgtcaaaaatgaaaaagaaatgaacaaaaaacaacactaacaaaaaagtttacattctctggaaataattgcaaatcatatatctcataagtgatatttagcatatacaaaaatattataactcagtatgaagaaatataaacaaaattaaaaaaaattaaaatgggcaaagatctgaacagttctgcaatgaagatatatttatataaatggtcagtaagcaaatgaagagatgctcagcatagttttccatcaaggaaatgcaaatcaaaaccacaatgagctatgactacaagcccactaggatggctatattcaaaatgacagataataacaaatgttggcaaggatgttgaaaaatcagaatgctgatacattgctggtaggaatgtaaaatggtacgactccttcagaaaacagtctagcagttcctcaaatggttaaaagtagagtcactacatgattacaaattccactgtatatataatcccaagagaaatgaaaacatatgtccatatgaaaacttgtactcaaatgctcatagcagcatggttgattgcagccaaaaatggaaacaacccaaaggtctatcaactggtgaatggatacataaaatgtagtataccataaaatggaatattatttggcaatagaatgaaattacatgttgataacagtgtgcagcatggatgaaccttgaaagcatgctaagggaaagaagccagacacagaggatcatgtattatatgaattcatttctgtgaaatgttcagaatagacaaatctatagggactcacaggggcaaaaagtaattcgtgattgcctaggtctgggaaagttttggagattggcagatgacagctaacaagagtggcatttttgagggggagctggtaataaagttctaaaactgactgcaatgatgattgcacatatttgcgaatatactaaagctattggattgtgcactttggatgggtgaattgtatattatgtaaattatatctgaataaagctactttttaaaaaagagagagtctggttccccagactgcctatgtttaaatccccacctctcctacctgtgaatgtaggccaggtatttaaactctatgattctgtttcttcatctgtacaatggagataatataaattacctacctcataaagctgttataaaaattcaaataactagtacatgcaaagaacaaagaccttctaacagaacctggcacatgaaaagtgtgatatgtgtccattcttcttatgcacagactgttaagggagagcatgaaagaagtatccaacttatgggtaaggcagtcggcaaggcttaaaggatgatatttaaattcatcttgaaagatgagcagggattatcaaggaatagataagagggaagggatatccagcattagaaagagtatatgcggaagtatgtagatatgatattctatcaagaatttaaagtatcctaaaagtaaattcaaatattttctgaagtatatgaaattgaaatacagaaaattccagcaacctatgtgtcatgtcttctcttttttaagagttcctttagagacaattcagtaagaaatttctctgtgactatgaaggtaatattgtatgatgtaaataatattcaccaagttaaaaataacattgctacaactctgatccagtgtaaagtttaggtaaaatagtactcatttttattattgaaacagtgtaatcagtagacatagctctgtgttgtgtacatattttgttttgtctcttcttctgagtgtactcatcttaggtgaatggggaaaatatgatttttataaacagactcttaaagaaaaatggcctatgcaaatgatgtaatttagagcaaccatagtatatgtgttcacttcagcgctcactaaataaaatcaccataagaattgatgcatgacaatggcttgacaatttcttattcttttgtatcacaccaattcttgaaatgatagctgttgcacagacatgtgtgagtattgctattgtatatgtggtagccatgcatgaccctacttttctcctcttggaagctggaacctgaattcttagactaatcaatgagtaaatatttcagagatgtgttatctaatttacttctgaaaaacagatctactacttgtctctagacatttagaaagagattgacagagtcatttgcaaattcaaagatataaaaacagtaggtagattgacttccataatcaaatcaatatttggttagaacatttcacaatattctaaccgaaattacatgaactacattatatactttcagaaatgcagtgtaccactccatctgaacaaaaacataatgttaaggtgtccttgaagctttaagtcatcttttggcaatgcagtagtttcaacataatcacaagacaaaaccagttccacataaaattcttcagaaatgaacatgaatataaataaaaacttgagagatgctactgaaatagattttacatttcagagttacaaaggaacacattagtagctattaaagcttacagataacattaccatctagcttactaataaatctcattgttagtattttctctagtctttactgaacctttaagattattaatttttttcatattttattgatatggctaggatagagttattaaataacttcttcaagttacaaatatgctaaaaataagcattgaatccttatctatctaatttactcccagccatgatgattctaacaaggactggcctaatttcctgccacaaaaggctataaaactgagccaagtatggaaaaaccttttcagacattagtcaattggtagaaatggactttgayacctaaaaggttggaaacaactaaatgatcccaacaattatcccagctttcttgctgctggcagtttccatactggagacatgaaagtatggatccaaaacagaacttgtcagcctcactgagtttacgaagtagagatcagagggtgagaaagctgatgtggttggcrcatattatctcatttttgagatatgttgtaaattagagggagctgagcaggaaaatatttacagaaatgtgaatcttgcctgagtactagaccatcaatgctagagagaaattctacaagtgtgggcaaagaatgacaggaatcagaacaatcgccagagctcacacatgatttttgagaaaggtttcatttggggagatcgtattgtatcaagaattcaaaagaaaatgtagaaagtatgtatttatctttgagttgtgtagtgatcgatagaaatttaggtgaatatctaaatatctatatagatataaagtaggatactcccacacaccttgctatttctgtgttttacatatttccctgacctcccaaaatgtccagytttttgttaggaagctgcacgctcatcttccccttctgagctccaagagcatgttgatgttcttgctgtttcatagctgatataaattagcattgggtaaacgacgaaaaaacgtcacagaaagtttttcttgttcacattttggaaatcttccttctcagtagagaaaagcaaccttaaagttgcaacatcatgattggatttcagttcacaaaagaaaataaattttgacaaatcacatatgcttttcctgtccctcccaaaatgctgcagtcttccatggcagccttaccaaagaaaaaactaagtccctaactggaacttggattctttcaaaggcacagtaagaggttttgaccaatagagaagcattgatcaaatcactatccactgcattacatggtactctaggagagtctgaaatgagaatagatatcttcaaaaagcatccaaatctggggctggtttactcatctgtcagcttctggaatagtgaacatgctattaaaattcagctccttctgggaggtgggaagataatcaaggggagacccaccatactgcatggaagtcccagaaatggaaaagctgatcaaaggaaggaaggtaatatacttttttataatatgttccttgggatttttaatgatcggtcgaaatacagaggttttggttttaaggtgttattttcacagcatctccaggtaaacttccaagtattatgttagcctggatagaaacaaaaaagtccataatgcttgaaactgaatatgtgatccttgcatcatgtttaaaattgttcagcaaggaatttcagtttctctaggtgatggaagttagcacgagcaaaggaactttacaatttttcagaattttttttttttcatgtttggaaggtctcctcctcctcctcctccttctcctcctcctcctcctcctcctcctcctcctcgtcctcctcctcctcctcctcatcctcctcgtcctcctcctcgtcctcctcctcttcctcctcctccttctcctcctcctcctcctcctccacctcctgcttctccttctcctccttcttcttcatttttatttttaaccattgctagtggtatgatttttgaattgggaaaacaaaatattcagactaaatattttcccaatgattcttatgtagagtaatgtactttgcaattcaattaaaaataacaagctaggatggtgttctgagccaaatgtaatctccaagaccatggtcagtaaagtactcaagaaaaaagtattgaggccgagtagtctgaagtctaytggggaataaagaagcagctgattagcatttgaaagcaaggtctttcactgttttaaaagtgaaggagaattttttaacagaacactcatcaaaaacaaagcgtttgaaaattacccctcctttgttttatcagtctcagggaagatgcacttygayacacgtctcaggaattaagatgcatttcgatacatgtaatattacatttggtgacactgctggaacatatgctgagaaatgcaagaataaataggactaatgctcattttcttttttttttaatcacttgcaagtgacatttgtttcatctaggcaggaaagcaggatcttatakgcagggtaggtgtaagggctgattttaggtcaagcttttcaatttattatgcaataaaatatagcaataaaaatatgcatctttatattttccagtaaattataggaatctccgtttaattttttatatatgtgctaataattaattcagtactacagtctggatccacagtccttttgataagagctggcacagaggtcatttttatgtgccttattattaatcttaataatatgtagtaatattcctttatatgcttattgtgacacacasaaacttaaagcctttgtagctttaagttcagatgtctccacattcttttgtaaatccctgcagatttgtttcttgcttttaaatatcagcacctttctgctgtctactcttaggtctctgccctctatgcaggagatcttttcttttaagtttcccaccgtgcttcataataaaatcaaaagaaaaaggtacatccctcagaaagcattcatctcactakaaatagaaaacctgtcaccttattcttaaaaccttagatcagccaggccagtggctgaaatagtgagggtagtgtctacaaagggtatakagtaggggtagcaaaataattatgtaccttgttctctccacatcttttagggaagagactctttgctctggaaaatgacttaataccattgggaggaaaacatttcctctacccacttaggttcctatgtttaggggcctgtgaattaactgataatagacagattaacaggagaaaagaaaaggttaatctacacatgcatgtgaagtcactcaataatgagtcgtttcctgaatacccagaggtaaagattggtatagcaacttaaaaaagggaagggaagtgtggctagggcatcaatgtgtagttgatctccttcctggrattagcagaaagctcttggaggagagttaatagcagctgtattgggggtagtgtcagctttagttaggtaagggaaagtcagatcagatttcaaatattttcactttaatctttatgctaaaactgtgattccttcaatatgctgatgaaagttgaagtgtggcttggaaaaaaagagaaagtataagtagatttattctagatataaagcattttttaggtatagtagaaagagagaaagagaaagcaacaggcacacacacactgagagagagattttgacacgaccatgtcaaagactaagagtaccccaagttctttatcaaccatgtagtttctgcaacctgcagtatacacacatgcatacccatatactgatggaggcagtctaaattaatggttaagaatatgaacttcagcaccagagggcattggattcaaatttcaatctttcttactagctttgtaacttcaaacttttttcctcttggaagctggaaactgcatttttagattaaacaatgagtaaatatttcagagatgtgttatacagtttacttctgaaaacagatttattacttgtctctagaagtttagagagagatcgacagagtcatttgcaaattcaaagatataaaaaacaggtagactgactaccataatcaaatcaatattggtttagaaaatttcacaatattctaactcaagttatgtgaactatattatatacttttacattatttatctaccctcaagtttcagttctctcctttgcaaatgacaataacaataccaaaaaataaaaaaactaaatgaggtaatgaaygtaaagtgataaggatgatgacaggcataaagtaagctttttattgtttttatttgctttttcctgtagcctgaaaatatgttcaaggtaaaaaaaagcattcttttgctctgaatctcctttattctaccaattcttttctcgtgtaagtgtctcagactcttcagttgtcttcactttgtcatttatttttatcctcaaatcattgatatttggcttctattttcacttctccaaacaaattgcttttttgtcttcatgatcttctacgtgacaaattaaatgcatgctttcagaccttaccttcctggacctctcacctccattggaatccactggcaatttactcccagaagccctgtcctctcttgcatcttcaacatcttctgattctgacctctctattcctttgtttatttgtttgtttgtttgagacagagtttcactcttgttgccccaactggagagcaatggcatgatctaggctcactgcaacctccatctcctgggttcaagtgattctcctgcctcagtctcccaagtagctgggattacaggcatgcgccaacatgcctggctaattttgtatttttagtagagacagggttttgccatgttggtcaggctgatctcgaactcctgacctcaggtgatcctcccgccttggcctcccaaagtgctgggataacaggcgtgagccacagtgcccggcctctctattccttttacctccttcattggattctcttcttccagagtttcatccctggccttcactatactttattgaatgacttcatttactttctagaaagttataaacaaatttttatttccaaccctagcctctctctcctgcttcagactcattatccacgagtactattgaaaaaagtattctatatttaatgacaaaaaaacagaaaatatggaaaacaaaaattaacagcaaaatcataaataattcttccatcaaaagttacttgctaatattttagtgtctaccactagctaaacttaactacatttccttatctataaaatttgaggtaattgaggtcccaaactcataaaactattgagcatgaatacacaaaaagtttttaaagtacccagcacatactaagttccatatgaatatttgctgctattatttttttcaatttcaaacatgtacacacatgtttcaaattcaaaaatgtagctttgtacattttcttcccatttagcaatatgcaaatgagtatttttaattgaatagatttttttttttttgagacggagtcttactctatcactctgtcacataggctggagtgcaatgccgtggtcctagctcactgcaacctccgcctcccgggttcaagcgattctcccgcctcagcctccagagtagctgggactacaggtgcatgccactacacctggctaatttttgtagttttagtagagacgagtttcactatgttgtccaggctggtcttgaactcctgacctcgtgatctgcctgcctcggcctcccaaagtgctgggattacaggcatgagccaccgtgaccagctgtgaatagatatttttaacagatgtgatcagtagattttttcagccacttagtgaataatttctacagctgcctcaaatgtctattaatttatctagggttgtatgtaattcccagccttctaactgttgacagttttatttctcattccctgaactatgttgaaatgcaaattaatgtctttacagagatatttttgaatctctctattaaaaaaaaaaaaagaaaaaagaaaaaaacaaaccaatcccgaacttcaaaatgctattcttggttttttaaaaaatgacctatagtccaactctgtgtagataattatgtgacagggcattgagacactgaagttgacagcccaatgtgctgtgctgtgtcatacagatagacttaaaaaaaaaaagccccaggctgggttctgtggctcatgcctataactccagcatttggggatcacttgaggtcaagactttgagacaagcctgggcagcatagtaagacccatccccccccccmaaaaaaaaataccaggcataacagtgtgtgcctgtattcccagctactcaagagtttgaagcaggattgcttgagcccaggaggttgaggatgtaatgagccgtgattgtgccattgcacttcaacctgggcaagataacaagaccccatatcttaaagcaaaacaaaacccatctctgattgtagcgtatttaggttgttttcaacttcttcctagataacttgcaatgaacgttttaaaaatatatacttgtgcacatttatgctcatttatgattatttagatgtacaattattagatgagataatataaaaaatttacagcctttcacttttatttttctttttcttttattttactttaagttccaggatacatgtgtagaatgygcaggtttgttacataggtatacatgtgccatgttagtttgctgcacctaccaacccgtcatctagggtttaagcaccacatgcattaggtatttgtcttaatgctctccctccccttgcctaccccmctaacaggccccagtgtgtgatgttcccctccctgtgtccatgtgttcccattgttcaactcccacttatgagtgagaacatgaagtgtttggttgtctgttcatttgttagtttgctgagaatgatggcttccagcttcatccatgtccctgcaaaggacatgatctcattctttgctatggctgcacagtattccacgatgtgtaagtgccacattttctttattcagtatatcattgatgggcatttgggttggttccaagtctttgctattgtaaatagtgctgcagtaaacatctgtgtgtatgtgtctttatagtagaatgatttataatcctatgggtaaatacccagtaatgagattgctgggtcaaatggtatttctggttctagatccttgaggaatcgccacactgccttccacaatggttgaactaatttacactcccaccaacagtgtaaaagcgttcctatttcttcacagccttgccagcatctgctgtttcccagctttttagtaatcaccattctgactggtgtgagataatatctcattgtggttttgattcgcattgctctaatgatcagtgaatgttgagcttcttttcatatgtttattggtcacatatatgttttctttatagaagtgtctgttcatatcctttgcccacttttttatggggttgaggctttcacttttttattgtgaatttgttttctggaaaacttttaccaattttaattcacataagtagtgyatgagaaagtctactttctcacatgcttgskgataaatgttaacattcatttttatccttgccagtcagataagcaataaattaaatagttcttgttattttaatttgtattccccaaaggtatgttaagagagcaaaacaataaatrattcaccctcaatggttgctgttaaactttgtctttttaaaatttaagctttaaagattatgactttaattattttttcttctcataaataatatttctcttctaaataattctaagtcacaattatgtagggataaaaaagaaagtatacattttaatgctttcctccattaaatttgaatgtgtgttaattttgtattcagtgctgcaggtttttacagaatactgtctttggttccatattgaacattcaccttgaggactttagtctattgattgaaagctttagttcatctaatagaattattatgacacatactccarctaaaaatcagtcaaggacagtcccagaagttaatactcttccaaagactgatgcctccactgagcacctctaggaagtatgagatggkgttgcatcacttctcactaagttcttataaccccacatccaatatatcaacaaatttcatcagctctaccttcaaaaattacctagaatccaattatgtcttattaaatccattttactgccaagtcacttctgatttattgcaaaaggctcctaattgatctcccagcttcttcacttgcctcttccagtctattgtcaatagtaactgtcaactgtstagtaaactgtgaaaatatatctgatcatgtctctcctctgctcagagcccatctggcttcctatcttagtcaaagtaacagctgacatcatcatagtggcctaaagactctagtgaagctctgccccatccaaatacattgcctctcagatatttcctaatatstggctctagcttccttggtcctagccacgctagtgtctcttctgtctcttaaacaagtcagagactcttaactgctgtatttatacttactctttcttctgtctgaatgctgtttctacasaggtgctttctaattgaaggtacaatcatttctcacatatgccttcttctcattatttgtktaatttctcttcacagcacctatcatcaccatctgacattttatatatatatatatatatatttccttttttgtktgttgtstgtcactcccactaaaatgtaggtctagaagaatagaaatgttcgtttgttgtttgttttgttcactgctgtattcttagtgtgtgcctggcattaacactcttttgaatgactgaataaatatctgaatttctgctatttccctataagtaatattattttggatagaaatgccactaatcctgaaacattttcaagttttatatggtttttatctttaatatttgtgtggctttctgctacattccaatatttaattagctttagtttacatttattaaatgcttctatatccagataatgtcatatcataagtttcagttgacatttattaacattactacttcttataatattttaacagaaatatgattcatcaactccagtgtttgtaaatatcatcaccattctgaagtcaaatgttgccaaagtcttccattaaatacttgcagacttctctcatttggtacagccagtcactccttacagctgcaatatgttatatctcgaatgtatttcttgatagctttctttaagataactgcacttgcaaagttctttgtacctagaaaactttcaacaaatatttagagaatataatttactcatgcatgtggatagacacatgtaagattcacttaagtgtcaaatttactaatataatgaaaacttggaccaaacaagcaacaaaaaatattatccagcactcatactcaaaacgcagtctgagagtttggtatttttcagttcctaaaggttgatcatgtggttcataaaatcttagtctccaaaatgtattttcaaatgaatgtcaggcagaaccaacaaatgagaactagggtacttaggattattgtaattscctaatgtgtttggtgaccttgtattcccacttacagcaacttatgcttctttcaaattcttttgtacaaaaaaaattgtcttgtccactctccacttagcctttaagtcactaagatgtggctatttcattagttgaaagcaatgtctaaaataaaatattttattttaaaaatcaatcatcttgcataataatagctttaactttatgctcaatttaaaatatttgtatttaaataattgcttacagaatagaaatagaaatgatatataagataatatagaagatgtaaggatttaagaagttaggatgacagtatttttatttacttttatcatttgtaattgtatcttattgtctggtaaaaacatttaaggaaagattaaaatctaagtttaatgtattatttataaacatttgctccttcataaaatcttcctgcaatccctctttttaaaaatgttttcattgcatatcccgatgatctgcttttcttctctccatgaaactcagatactagttttctttacaacacctggattgtttcttcctctmctgctgttccttattktgtttttctattctggtgtcttgatatctccttttaacaaattccataccattggccttcctaacttgtgaacatttctaatactcacatatgctctataaaaaaaagtgaggtttttccaagaagaacagtggccattaattctgcatatatcaaaatggaatgtgtcatctttgagcaaaatataagctcacaccatgcataaagacaactattgtttgcttcagccaggagtatgttttagggaaaaaatattttaaacaagccattaagaaatagtctcttttttctttaatgtctttgagctacatatgtgagcagaattataaagaatttccagtgactcattcttagttttggccttcctggcattctgtagtcgtgcatattaaaacctctaaacagctctcagtaaagccttggcagtagagcttgtagcttgtacctatcaaaaatgtcagatgcttttttccaacgccatcactagcaaacaatattacttagttattaacatataggaattaacggcaaaatctgcaagttgcaaacagtgttgtaaatcaactaagcatttatcatgagattttttaagtgactgaatacagattcagaatcatgaagttattatctaataacccaacaagtgatgtgaataaatccttgctaatatgaaaattatcagccactgaaacacccttttctacaagcaggtctgtggatcctcatgctaatgtacttagattgataaaccacagacattctctgaaagcttcgtttgttccagttgctgaggcttgtgcttagagcatctgtcatgcaaatgatcagcaaatcataacctgtaatttgttttcatttaataggcagacaggttttcaccaatttagactcaagtcctattaatactctttgaaactaattgctggaaaatgaattttaatgacaggattttatcatttattattttcccttctgtccctataaaggaagactcaaagccatctactcacactttgaaaatatatgttaaataggcacaagccataatctcctgtcatctgggctgttgcaaaggacccctaatcccctctcttgtaataatccattctacactctactcttaaaattactttcttactatcccatttcccttccacaaaatcttcaattccctgtcaagtaaatagcagacactttaatatggcttcgttgccctccattatctgtttgcagtttacatatttttatccttatttgatatcgcaatataacatgtatacagaaaaaagcatgamacattaattaataagtagtaaagtaacatccagaaaacactactcagagcaaaaagcagacgattgtcattaccacagaaacyacctccccagtgcatctttctgatcagacccttcccagcatcccagagtctaaccacccagagataatcacttcctctattttctttagattgtctccagctacgtgtgaattcttaaataatatggtcaatttacccatttttgaatgttatgtaaatggaatcaaaatctgctttctttggctattgcttttttcactcaaattattctcttaaacattcattcattttagggtacagcttcagttaacttcaattttaagctgtttagtattccactgcatcaatgtaccacaatatatttatcttttccatgttgatgggcacttggatttttagattgtttccacatttgagctattacagacaagggtgctatgagcattcttggatgtatagtttggtgcccagtattcttttgtattcatacctaaggagtggaatttctaggacttagccatgcatattcatactagataaatattgatgtaatacgtaaaaccaagtaatattaacttgtatataagtagctctgtatgctactagacaagtcaaaatatttttcaaaatggttgtaaatttatatatcgagcaggagtgaatgctattcactcctacttctatttcgacttctagaaataggagcacttctatttctttatatgcttgacagtacttgggattatcagactacctcactttctgttcctcctctatttattcttgctttaggattttctatcctcttgtttattcttccttcaccctggatattaattctgacctattgcaattcatgaattctttcttcatctgtttctaatctattaatgactcagtcatatgttaactttggtaattgtcttttctaattctcaaatttgtttagttctttttcaactgcgtaacaacactcctttgtagtttccagtttcctgccaattaaaaaagcattgcccttcatttcttcaaacacaataaacataatatttccaatatgcatctgaaaattctagtatctaaattcttgaggatcaatttctgttccttgtttcttctgcaggttctattattgaagaattattatgttggtgcaaaagtaactkaggtttctaccattacttttaatggcaaacaccacaattacttttacactaatctaatatttcttttcaccacatttctttgatttttgtttggacatcatattcaaaaattatttgaaggaatcatgttacacctaaagtaatattacctttttctagagaggattgtgtttttctctgtcaggaatctggagcctccatcagggtaccaccataaattgtgttaaaatttgagattaaactatgcagtcctggattttaatccataggtggaaaaaaatagagtttcaaagaggtaagcttcaattaagacagattatgatgcctccttcttctgtaacatattgtgtgactttgagttgagattcttcctaagttttctgatctattaaaaaagatatagctggtaatccccaaaatcatgattttccttttttttttttttttttttttacagtttctactgtatttctttgttgtcctgtcagtaccagttatggtgtgtgttgctttttctttctttatatttttgttgagcacagtgattgagtacatgccccactaatagggtataattattttgagagtaatatctatgacttaacaccatatctctcactatattgagtgtagtaccttgatgcagtagctagctgctcagtgaatgttaaatggataaatcaatgactgaataaattttagagataggtacatagataaaagtgatcaaaacaagctaagtattactgcagagaaggaacaagtatcttttctattatagttcccaaagcttcaaccaaatttcttttgctatgtttacctgtccaatatattggctggttgtactcatagagtactagtcttagttagaatttatgagtaatggtccaaatccgtaatagagcttaaaactaaagctttaaaaacattgatccagatgaagaatgataggatgcaatgaaagtttatttagggcataaaatttaaaaggtatgttatcaataattcattttgaaagtccccttaatatagccatttctattctgtatctttaaccagttataggtgacattgctaggaacagattttgacagcagacttgtgcaagggatctgtttgcctagagatttacttaaaaggtagaattaaagtcatttcaagaaagaaatttaacataagaaaatataaccatttagtacactaaataattggtctagctagttatgagttaaaaatgaaaaagaattaatagtttttagcaacatatacattgggacagtatttttgccacatctatcatttacctatgcaataattaaattcataattttttaagtgtcatatcgaagagtgttattcaacttcctggtgattaaattactgataaacatagccgattttttttggttttgcaggtcctgaaaaatagagaatgcatatgacttccaaatattggtagaagagccagtcaaataatatcttccatgaatcctcttacaattaatttgctgattgatagatgttcaaaatctagaaatgaatgagttgcatgtaaggaaatcagtacatgcttctgctgccatcatatatcacaatacaagcattaaaagctatattaattatagaactttatgatcttatttacatggtctgtgaatttgatctttattttggaattcctttaatccattctgattctaatcacctcaggaccaactttagtgtatttgtacaaggcgtaatcattggctagctctataagttgtccaaacaaccaaatgagatgtcgcaaattctgccaattgtgtaaagttttattatgtactttaaatatatgaatatttggaatatcaagatgtgttgtattttaccaayaatattaaaggtttgcttgttcacttttcacttgtattatgatgtcatttaaacaagtcagtattattagaaatctgattcattctgaaaacctctcatctactgatctaatgatcttcaatattcattaacatgaaatattactataataggaaaaaaatcggtaccttaacaaaaaatatggaaatttatttgtttatttattatttttacttatttatttatttatttatttatttatttatttatttatgtttttgagacagtctcactctgttgcccaggctggagtgcaatggtgtgatcttggctcactgcaagctctgcctcccaggttcacgccattctccggctgcagcctcccaagtagctgggactacaggcgcctgccaccacacccagctacttttttgtatttttagtagagacggggtttcaccatgttagccaggatggtctcaatctcctgacctcgtgatccgcccacttcggtctcccaaagtgctgggatatttctttctttctttcttacattctagagccttggcgagttggcccaagtgttgtacagcattttcrgtgtcagggacatagacttctctcctttctctgctgtgtgtagtctcagatagttaccagagcaccagccattgtatgttctttctagttttcaggtagcagaaagaataagaaatgttgcacaaaccaccctgtttacatcacgttggccagaattagtcacatggccatgaagcaagccactttgcctgaagtaggactacagattgtctttattctccatagtggtaaaatataaaaaaatataattagagaagaagagaactcctctggaggacaactagcagtaacctactctactaactgtccatttactagttcattttgctctaagataacatataaacagtgaaactaaaatatgttttcaaaattagaaaatgtaagtaccttagataaccaagattaaagaaatgttacaaataccacaatatcaacatagttatagatgaacatcaaacttagtactgattttctgaatatccaaaatgaaaagaaatacctcaataattggttacattgttttttatcattttgaaaaaggcactactgaggcaaatgaagctctttgaccctgaacaattacaaaatttatctcatagcaatttttagggagaaaattgtatattatagttgacaatattcctataacaggtgcagtgattttataagctacttacagtgtctttgaataaaagccaaaatgaaagcattatgaaggctattttgtgaatctctgaggaaaaatcattcaaaaaaaaaaaaaaacctttggctattctggcttatatacaaggagaaattttagcctgcccagagggctggatggactacatacaccatgaatggttatctgtaaatattactgttgctgaaagatttctgaacaaatgtagaaaattaaggaatagattatctagttttctgtagtctgccagcatgtttcaaatcaatcgagctttcttaacaccaggtgttctcagaagtgaaaggggcctatttgttagctttaaaaagacaaaaatgggaaaagataaaagaggtggaagcagaaaccaatttgctaaatttactaaattagacagtttattgaaaaggtaagtgaatttctcatatcagtcataaagaagctatttttccaatgaaatgtgtgtttatatcaaagtcacaaaattacttagtgaataactcccagtaaatgcgatattattaatttcagctaaattatatgttcttagaatttttttatcttttcagattgttttatgtagattatagctgttaaaattttattggatgtaatttacatggtttacaaacaataaattcctgagaatagatacgataaatttatagtttgttgaatgatttattattaaggagtctcagattggtcctccgaggacaggaaaaataaattcatggaccctaagttttttagttacttttatctaatttttgatatggtaataattaaaagggagatgataagaaattgaatgattaagcattgttaaataatatgatgcgttaataatgcataagttatattcctgagttgattctttcaaagtataaaacaatttttagatttaatcaaaactctttaaagaattaatctttgcttttagggagcactatagattgacatcagaaatttctcttatttccatgtaggaagaaccttttgtgatggtctctgaaaatgtcttgggtaagccgaagaaataccagggcttctccattgatgttttggatgccttatctaactacctgggttttaactacgaaatttacrtagcaccggatcacaaatacggaagcccacaagaagatgggacatggaatggcttggtaggagaacttgtctttaaggtaagaattactttatttatttgtctcatacttaaaggttcaatwatttgtctcatacctaaaggttcaacagtaacaccttgaagctgatttcatataaaataagtgtgatgtatttaggttggttaagcattaggtggtggaattgagtacaaaagtctcactcaatactattttatgaactttgtggaaagaaaagtagttgacaaaataaacctaaatgttaaaatatatcctgtaatagaaaagggtttagaagaagaccttttctttgctcaacttataccccaaaaacagaaagtgtatatgatacgtgatgaaatcacaatgtaagttacacatgcaatttggactattttttttctttctttttttttttttttttttttttttttttgagacagagtctcactctgtcctccaggctggagtgcagtggctggatctcggctcactgcaagctccgcctcctaggttcgcgccattctcctgcctcagcctcccgagtagctggactacaggcgcccgcccccacgcccagctaatttttttgtatttttagtagagacggggtttcaccatgttagccaggatggactattgttttctttttaaaaatgtgatgttattggaaaaaattaaaacattcactgcttaraaactaatcatttcattctgtaatctaatcaagataggkatgtacatatgtatatatttttctttgttctttcaattctcagaaaggtgtttaaaacctctatgtcyttctttagtcctgtcagaatctgcttcagttttttgaggctctgttattaggcacatagacatttataattattacattttcctgataaattattgaatagttgggtttaggtttataacttactgtttggtttatatgtataccatttttttctctgttgcttcttttcctgtttttcttggggttaattaaatatatttcagtatttgattttattgctcttactgcctttttagttgtctccctttgtatttttgttcgtggttagtctaaaggtcataatatgccttcttaacttactacattctatcttaagttaatattgtactacttcacataaaaagtaataaattttcagcaatataattttatttgtactcactcctttttgatattgtgttcacatatttatattttattaacctcataccaaatatcatagttttttatttaaatatttattgtcttttaaaggtacagaaagaaaaaaaaaaagacagttgctgggatataatcacttatctaccgtgtctggggctctttattccttacatatatttgagctcccatttggtataatttaccttcaacctgaagaactttctttagagtgtcttgaagtgcagggctacgtaggtagcatatactctcaacttttgtttaccttgaaatgtcttttttaaccctcatttcaaaatgatattcttactggatatcaaactctgaatttacagggttttttaatgttcatcattttaaagttgtgattctatcagttttgccatatattatttctgatgagaaattagccatcatctgtatcctgattctttatatgtagtatatttttgtatgtgttagtggccattctacaagtttctcttcattttttggtgtttagaaatttaattatgatgttctagatatgattttctttgcatttattgtgctgagagttcactaaacttctgggataggttacatttagtaaatatagagaattatttcttcaattttttttaccttctttcctttctcttcttgatttgaggctcagagaatattcaagttagatcacttaatgttgtctcctaagtcactgaggccttgcttgttttattaagatatttttactccctgaccttcagatttgacaatttgtcttgatctgccttcaagtttactgatattctgccaccttcaaatttttgttaagtcctttcagtagctttttcattctagattgcttattttttctttccagaatttcaattttttgaaataatttttacttttctgctgagatttcctatctttttatcagttatgactttcttttcttaaaagttcatgatcacatttataatggcttctttaaagtccttgtttgctaaaatttcaacatcttatcatctcagaatacattgcattttcctggttcctcacatttctggttacatttgattatatattggacttygtggttgatacattgttaagacttgggattatgtctctgaaattgtatattctgaaaaggattgatttttgcttcagtggatagttaaatcactatctgttctcttgaatttgtggagatttagctttaaacattgttaaggcaggtctatttgatgtaatcttggtccctagggcaaatcccttggttttcgtagtccacatatttctaagatataaccttctggagtttctggggaaagcctgtggttctcctcaagcccttctgacttaaaggaactcaaaattcaatctgtatcttccctgtcataggcaacagttgtaatcccctctttagcacgtttagccttctagccattactctttgctaattttcctaggatctctcccatatatgtgcagtttaggggtcagctaaggattttagaragtttatacacagattttggggctcactcctctgtggcatcctccttcttgtgtttcccttttcaatttctggcaaccctagctgattcaaactccatcctctgacaagttagttaataagactgactttctacttgagctctgtcgaccccatccccgctgaactgaagtgggtcctcaatgactaagcctaataaaggagggctctaccccgtgcagttattattttcaagggtaccctgcagtttctgcctgctttgggttgctctccagtcttttctatatatttttttcaatttgrtcctgaatttttaatttttattctgatagggctagtccaataaaagctagtacatcattgctagaattggaataatttctcaaatgctttaaagtactcagaaggctagaggatctaacctaaattgtttgtaaggaatggagaagagtagaaataaaaggtttcttaaggcagtggtagggaaaataataaagctatttctatattctataaaatcctaatgaatttggtctatttaatacataagttacatatagaattgtattggaaagcattaatatcgttatttttaatacaaaatgggcaatcgtcagtcctcttccttcttattaaaaccgtgccccttcatcttctattcttttaaaagtcacaaattcagtgttccacctttatctttctaagggctgtttcctgatctgaacccagattagcaattacgttaaaattagtgtaaagaaaaggcattatacaaatttattctatatagatagtggttaaaatccttaatgagttattatgctaataaactacacttgctagatgcaaattaaacataaaaagcattcaaattagtatgttgatgttgtttttaatttgttttatgtgcttacactagttagtttaattttggagacttactttttcacctataaaaatgaggagtccaagtatgttaatggtaagatcacttccaaatactatgttttgaaaatataagtttatcgtatagcaatcatacacaagaaatagaatgttcttcataaacaatcaatttcaatgtaytatttgcatgtaagagcatgtcattattgtatgataatttatagtttagagggagtccttttgcaaataaaaaattgaggcttaaagaagcagacatatgatttttagacagaaaaaatataaaattattcattggaactaggtttttattttgttcaaccggatatttagtcactctgactaggcttcaggaaaactattaagcaggtggaggagaagaaacctacaaaaaagacttagttggagtagatagagagattaaaagaaaattgagaaaatgggttgtcatgaatgccaacagaaaataacatttcaagaaggaaagagcagtcaacattagaaaatgactatcaagttaagggtacacaacattcccttaactgtattctgactgttatcagtagagatgtaagttataatttttaacaattacaaatgttaattcaattacataatgatactttaataaaataccataaaataatttagctttccaagaaaattcatcatattcaaactttatgaggtgtatttacccctataaaccaaaattacaccgttgaaatggcataaaaatgttatgatggagctccagaaaagcaagcttattattgttattatatcttctgataatatacatacttttgtgaatctaagtatattttaaataaatgttgccactaaatatctctgtacaagacagtaagaattttaaaattaacaggattaactcgtgtgcctttctaaggggctaccaaacttaaaagaatgtttcacatagtgcaattatatatatcataatgattatgcacgtaccatcacattaaagaagagtcaaagaagaaatgttggaaagtgagctctgaattcatatgattattccacagtgattagatctcatgttagagagctttctcattaaaaccagaagtcagtggtccagtacatacatacttttaagagaggaaaatgcagtcagagagagagagaaaatgattgatatgatgtacatatggagtctatttaaaaactaataatatagtaaagtctcctcaagtccttctctgcctcactactcttataattttctgcaattaatgtgttcttaaaatttatgaaaacacaaatctggccaaaagatatgaaacagataaatgagagatatcttctgcctagtacaggagaaatatttaagggtgagttaatgtaactgagaaattattttctcctagtttagaagggaagagaggcccacagagaactttcaataagaaataaaaagtatatcaagtttaggatagaagtaccaaaaaaattaaaaacaaagataactctgaattagatacagttggatgtttgatgatatagtttcttctttggctggctttcaagtcagaagcttttaaagtggagtatttaggggtattagaagactttccaagggcaagccagtatattcagcacagaaaaatttcaaggtgttgagtgacattttgaaatagaaactaaaaacttcctttttcatatattaatttgtttggaaaagatttctataaagtaaaaaaatacagaaattaaatcttaatgctaaactctacctcatttaaaccataattagtactgacccatggatatctaaattatttttttaaaaggctctatccataacattgtaagctgcatttgtagtaaaacttcatttttatagacactgaatccatagatcgtatactaatygaatcatgactcaattcagaaaaaaagattttatacctaaaactttatagtcactggttatttaaaaaggattgtaattttaatttgtatgcatatttttgatgcaaaaatactttggtgatcaagaaaagactttcaaacacacatttctattgtacttgaattacaattgtgtgaggktggggcggaatataaatatagttcaagcataaaataaaatgatataaatattctacctattaaagcatgaggtcaaatcactatgatatttagattctaacagatatatttttaaaagtgacttgacaatattattttaagttatcaatatttacaacacaatatacatatgtcagtgccgacgcccactcaggaaaatgaaaaccattcctaaaattttgaaaagaggagaatttaatattgtgggttgatcacaaaggcgctagaaggaatcaaagagcaaaggatgaacagagtaggacattggaaaagcaaaaagaaaaagtaaaacacagatatcaagtgttactgatgtgtcagttgattgtatctgccagacgtatgccccttgatcagacctggaattgccaaaaagttgctgcccgtgccctagctgctgggatcaagaatcgcctactgccactgctgctgcagccactgaaataaccatttaaagcagacggctcttctctttctttttctgtctgatatcttcagtggtttccctcaggtggaaattatggagaagccagatggcaaaggagcctgggaaatctggtttgcagattcccatccctataaggctcacagtatatagcagagtagaaaatggtatgtataggtttaagagaaaacaggtaatgatcagtactgtctgcaaattgcgccctttacaattttctaaatgattgcaaaattaatatgtcaattataaatgtagaaagatacatacttaaaaaattcctttggggtttatatgaagaaaaaagcttgatggttattacaatggaagatttattttatataaagmacwtgactggtmgttttggatttaaaaataatctgttccttcagcctaattttacctgagcgtttccaccacctggaaattaaatctcttcatgctaactgattatcaaatrctaaattatatgacaagaattttactccccaaggaaaatagatccaacaatggaagaaagccagaacccaggaaaatggaaaaaaaggaggaataagtggactaaattataaatctgtaaaattaggataaagtactatacttagcatgtaagtattaatagtgatgtttccatgttaaaatatagcaccattgagagtcctatctctcaatttctaaacttctagtataacactaggcttttcttgtcactgtgcccacccacgtggtttcatgagagtaaagaatgtttttgaaagtagacatataatattggagtataataagatactatttagtaattataatgccaataatgtcattttctgagaaagaaaatgctcccaagactaaacagagtaaatcagctgcttgggactacacagctttcctaatttttatggttgacacaaagtttggcaattctttagttttactaggtaaatgaattyctatgatgggtattttagttcatcaatgcattaacaatagaaagcatatatttaccgggaggctttataaatattttattttattattttatttatttatttagagatggagtcccactctgttgcccaggctggagttcagtggcgcaatctcggcttgctgcaacctccgcctcctgggttcaagcgactctcctgcctcagcctcccaagtagctgtgattacacgcacccaccaccatacccggctaatttttgtatttttagtagagacagagtttcgccatgttggccaggatggtcctgaactcctgacctcaggtgatctgcccgcctcagcatcctaaactgctagaattactggcatgagccactgcgccctgcctataaatatttcaaaacatatgccacttaacatgtgttaatcacatgccatggtcaaagtgctatggagggatgcaagtgtgaataagacatagacattgatcatgaaaacattttgttgatggtctctatgtgctatgcactgtgctaggcactggagatacaaagataaataaaacatggttcttgcccttgaagagatcttgtcttaatgagaaacacagaggttaaactagacacttataatacaatgcactaggtgcaatgatagagaagcactaagaaagcaacaaggaaggtagagtaaaggtaaatttcctgaaggaggagaaatatagcctgatgacaaaataacaggtagtaattatctaggtaaagagggattggcagaaagtgaaggacgtctactgacagacacaagagtagaagtaaaggtagaaaggttagaaacagcatggaaagcaggccaaaatttatgagaattttgcagctctccaagcaaaaagtgatgagaatctatcctaccatactaatgttgtgaagagaatgaaagacaggaaatcagagataaaaaggaggtaggataaacagaatttattggctaaagtgaggagaagggagaagtctggaataattcatcagttcatagtacaaatacataaaagggtggttgtgtaactaattgggacagagattgctgaaaaagatttagaggaggaggacagtttagaatagggtgagttggatatgtagcattctgaagctcactgtgaaagtgccataggaggtatacatttgggagtcagcaacctgtgggtggtagttgaaatcatgaaagtacatcagattgccaaaaagaacacatggagtaagaggatcactgggctaatcttaggatgaaacccagagaaagctgtcacttaagaattgacaaaataagaagaatttatgaaaaaaaataagaaagtttcaaaaaataagctatgactagcaatgtcagaactatttgagatgttgatgataagaactgccaaatgttcactagattggccatttgggagttgttggttacccaagccagaactcttttggtagcatagtgggagaaaaagccagactgcaaaagatgatggaaaaacttggatgtgaaaaggtgaaaatgacatgcatatgtattattttttcagaaattttagatggagaggggaagaaagagataataattggaagggtcattggttttggtagagtttttgtttgtttttaagttaaaacagagacttgagtaaaattataagctaaggaagaaaaagaaagaaggaaaatgtaatataagaaagtcagttaatatgtgaaggataaatatcctggaacagattcaactccatcaaaaatgattaaactgaaaattgattttaatgaggtaaagatgttactttgatactgaatataatataatgagaatgtgtatgttaataatagataggcaagagaatggaaaattgacaaagatactttcttattccttcaaatttattgataaaaattggagattacgtatgttgacagtgatggggacatgtattatgtaacagtctacaggagagtggtgaagattgaaatagacattgaggaaagggaaagtgactgctaaatcagaacagataaaagaatagatcagtggcactaaagactgagtggaggtttatatgaaactgacacttttttattgctgctagtttacacaacagtgtgactttcttcagctgagattgagtgcccaagtctaggagcagagatgaaaatgttcatatcaaggttgagacatggtggataaacttggtaagggaattaaatgagatgaaagaagagctaaaatgattaaggaagcatagccatgatcagagacataaacttggataaaattttggaaatgttaattagaagatcaaatgaagttgaaaaacaggtgaagtatgagtgaagaaatgaaagagtaggttagaaagacataaccagagactgaaatacgaaagttctagaatttgaccttgaggttcatggcagagtgttagagaaaacaaaagaaatgagtttaaaatagctcaaaatggagtgagggagggagggatgaatagatgaagcataggggattttcagggcaataaaactattttggatgatactctaatgatggatacactgctgacattatacacttgtcaaaacccatagaaagaatgaactctaatgtaaactgtacaccctagttaataatcatgtattgatattggttcattggccaggcaaggtggctcatgcctgtaatcccaacactttgggaggccaagatgggaggatcccttgaggccaggagtttgacaccaatctgagcaacatagagagacctccacctctaaaaaaataaacattaaaaaaaattagctagacatggtggtgcatggctctagtccgagctgttgaggaggctgaggtgggaggatccctttagctcaagagtttgaggctgcagtgagctgtgatagcaccaccgcactctagcctggatgacagagtgagatccgtctccaataatgattgtaaggttcattaactgtaacaaatgtacctcaccaatgcaacatagtaataatagggtaaattattcacactttctgctcaatttttctgaaaacctaaaactgctttagaaaataawatctatctgaatcatgacccaaaatgattgttgtaaggaatatctacattgattctgaaatmtattaggaggttggtcagtttttgtgtgaagagaaacatttagccaggtctcaaagttttcagagaaggagaagaagatgctattgtgaggtttgtctggtggaggtgatgagacctcagaaagcacatgtaattgacaacataaaacaaaacaaaacaagaatggagatagcatgaatagagtctcattaataaataacaaaaaacaggttccttgagtatctaagaaaggcaaaattccatggccyctaataaatagtgaaaatgatggaagagaattcccacgccatgtcagctcaaaacaagtatattttttgcccaagccatgctcaagctcttgctctttttctatgcctcctgtgctcatccccactcctattgtctaggatcccgcacactgggttattgatgtagctagtcatgacacttggctgatggagttcatttcaataccctagtagctaatgtcaatagaactttcattgattttccagtgtcctttaattcgttaggtattgaccttttatttaaatcccacatgaccattccaaacattttccacacttttcaagcctcaatttctagtcccttcattttttacaccctcgtcatgttcagttgttaaactctatggtttactgcaaaagctgtgagaatctagcgtaagtcccttgtgttcttgatattcaacctcaaaatccttccatgattctctcatctttagtgacatcaaaggcattagttatggatactgttgacacatttaatacccatgtgagcctaaaagagttttgaatcctctctgagtcacaatgtccacatcagtggaatgaagctattgtgaagatgaaccaagaaaatgaattcaagaatgtgttgcaggaaaaacaaatagatcttgttgtatttgttgactcggatagattggtaaaacttcctcaggttctgtgttttaaaaatgtaacagatccaacacatatttggaaggtagtctgataggatttgctgtggggaagtgagagaaagaccaaagccgagaataatggtttccagcttcatccatgtccytaaggagatatacytaatgtaaatgtcgagttaatggttgcagcacaccaacatggcacatgtatacatatgtaacaaacctgcacattgtgcacatgtaccctagaacttaaagtataataaaaatatataaaaaaaatttwaaaaagaccaaagccaacaatctcttctaaactcatccctttttaattttgtcttttcagccacagcagcagaaaacaaaaacaaaaacaaaaaaaaacagcctttatttccattttccccagctccactcactatcttgttcctagccacaattatctcttctctggattgtagccgtagaggtccaattactctccctttccactcttgactgccttcaatatattttaacacagcagccagagtgatccagtcattttcctgctagaagacttttgatgggtttccatcccactcagagtaaaaactgtccttaaaattgtctacataatctgcccaatcaattccctttgtgatctctttatctctccctctgtcaccatgctccaagcttatggtaccccttgtacttccttatactcattgaacttggccttttcaatttctgtctctcctatctgcctaaaatgatatttctctgtccacctcatttttttttcagcatttgcttaaagcttattagagaggactgccattgccaccctcttcaaaagaacaacttccatcctttgtactacctatctctcttattctgttttattgttttttataacacttacaattattttattatgtactgacttgttcatttgtcttcctctggtaaaatgtaagctgaagttggtctgagatttcatatatttggtttactactgaagcctcaatatytagaaaatatttgtacataaaagaatgaatggtggccacatggcatacattaggtaataacactcccctaattaataaccattcaatgggatctcattgctctttaataaaatcaattaacctactatagcctactaaatttggactttatataaaatgtttttatctttgttgaaagactacactttgagcttttgttcctattattttaaatattttgtccattaattaaacagcttgttatattcagctactctcactttacttcaagttaattgagaatggtaccatttattggcacagaagaaatgaatgaaggaaatatttggccaggagttgcagaatgcggaatcaaaactactattttagaaatcagtaataatacccagatgctattctaaagctttacaggtattgactccttacatgctcttactaatttgatgaaatagatagttaatatgcccattatgtagatttaagacatcaaggcttagagaatttaaataccttgctcaaggtcacatagccaataactggaagaaccaggatattagcttaaattgtttgattccattctcttaacaactatggatatacctctttggagctatccaaatggaaaatgaaataagtaatctgatatatgagtctggagttckggtaaggatatggaatggacacatgcatttgaggccagtctgcatatagatgaagtttaaattgcccctctacctttctttatccctacttctcttttattttcagtctctttcaaattctttgctccttccccatttcttaaaaaaggtattctctatcttgaaaataacctgctcatgtattctaagctaaattaattaggtgtctttggttgcaaatgacaatccaattgaagtgaaaagataatttaattctcacaaaactggcctattcagggatgagatccaggctcctttcatcaggctttggtatcgcttgctccatctctcagctgtgatttttttgtgtgtgtgttgccccagttctcaggcaggctctcctctcttggcagtaaagtgacttttagtagctcttaggcttagatttcatcctcttatctatcccaacataaacatagattctcttttacctgcagttccaatacagagcctcagctttaacattcactggctctgactatgaagtattgtgttcaagaggaggcagtgttctcaatgccaggcctacaccacttgcccaggtggagcactgagagtaggggtagctacacgcaaaacacctagagcaagcctcggggagtagtgaatcccaaggaaaagtaggatgctgttatcagaggaaggggaagtagataccaaacaggaaaaacaaaagatatccttcaggggcttaaaaacaatagaataagttacaggaaactatcaatagttacatgtacacaaaaatttaaatcgacagtaatacaaaatcataatgaactaaattaaactacaaacaaaatgctagaaaatatttgtaaaagtgtaatggtgacttgtttgtgtcacygcttcactgctacatgaagtaaaaatcaacaagaaaatactaagaccccactggatagatataaaagatatgaacttagagtttcaaaaggagaaactagtaggcagtataaatccgaaagcaaatatattgcaatggagaagggcagttaatcattttttagaaagttaagtttatgaaatatgattgatatatattttattttacaaaataatgtaaatgtgttatatatgcttggaattattttatatgttgtatttcataataaagtagaacatcaccagaatttgatgacatacttgtcatcaataatagatttgacaacactgcaattaacacaaaacccacaaggaatttaaaagcatagcttgaaactgaccaaataacaactatactagcactgatatagagcttacttattcctgacacagtctcacatactatgtatttattacctctcagtactcacaatgataagtactactattatctcaatgttgtagatgatgaaacagagagaggtgaagtaacttgcccatagtcacatagccaagttgtagagaattaattattcaaattcaggaagtttggctccagcatccaagtgcttaactcctttaccagtttccagagaaaaacagttttgtctgcaaagcatttaaataaacccagttacatgtcagtgagaaaaacaatactcaaacagttcagagctgtttttttttaaacctgcatatttgaagaaggttcagataggagttcagacagagtatgagtagaagacaaaacataagattacatagagaaagatwtggggtgagatgtaaaagatttgcatttctaaacttctcgaaattcacacttctttctcaaacacctgtgtcttctttccataaaaaattaaaacttttagaaaggactgcaatatactgtacagtctatatctcacttccctcttgcatttaatcacactccatttagatgacattcagctttaatctgcctagactgcctgtactcacttcatttctcaaccctagctaaacttgcactttgtcccataaggctttcaaactactcccatctcttagtaatctcgtcctctgagaacacctattccacttcttttcaaattacctttgtgtaatgttacacatctatctatatatatctacatctatatctataaatgggcatatatacaatctcaggaagagagaacgagagagatggagggagagagagaccttctttttgcatagtccctgttttggaaatcagaagactaaggttatgtttactttgtatgccaagcacacagcagaatgccctaaattcatccatttatctgcacatgtttttgaatgcatgttgtattctgggcactgtgcctggcatcatagatacaaaggagtggaagatacttttcctcggccttcaaagatctctaagtgcacacgaaaaacaaatgtgtagataaataattaaaacacagtgtgaaaaatgccatagggtaatacatacagggtgccatggcaacccaggggccgaatggcagcttctgcctggggagttgaaaagatttcacagaagaggagaaatttaagctaggtcttcagatgagtaggagtataagaggcaacaatagggataattataaaagcatgtttgccttgataaatagtttgcactttatcatttagccagtacaaattataaaagagttttacaaaagagaaaaatgtgatttaacttacgtttaagaaagatagctgaggtaggcctgagaatgcattggagtgaggaagagaaaaaaacaaatggctttttcaacaatctagggaggaataatggaatgtctacattaaaacaacagtaacaggagactaacaaaaagaatgagtctgaggaaagttaatattctttattttattttattattattatactttaagttttagggtacatgtgcacaatgtgcaagtttgttacatatgtatacatgtgccatgttggtgtgctgcacccattaacttgtcatttagcattaggtatatctcctaatgctatccctccccccatcccccaccccacaatagtccccggagtgtgatgttccccttcccgtgtccatgtgttctcattgttcaattcccacctatgagtgagaatatgcggtgtttggttttttgtccttgtgatagtttgctgagaatgatggtttccactttcattcatgtccctacaaaggacatgaattcatcattttttatggctgcatagtattccatggtgtatatgtgccacattttcttaatccagtctatcrttgttggacatttgggttggttccaagtctttgctattgtgaagagtgcagctataaacatatgtgtgcatgtgtctttatagcagcatgatttacaatcctttgggtatatacccagtaatgtgatggctgggtcaaatggtatttctagttctagatccctgaggaatcgccacactgacttccacattctatggcataataatagaaattgataacttggaggagaaaagaaggaagggttgagacttggtgagaaatttagcagaggaaaatgagcagatggacactccacaacaaaaataggggatgcagaaggaaaagcagattggaaaagggcaacagggacacasaatttggctataggcattttgattttgtggtacctgaggaacattctcatggaattgtctaggaacaattagtcagtgagcatctggaacccaagtgaataatgttgagaatttctaaaagtttaggaaacataggtatttccatcacttccattataaaaacttcattgggaatgttggattaataggaagatcatgcacagaatgattatttaaggtcctaaattgttccacctgagcatgggtaaggagaacaggtgttaattatttttgctgcgaggggaaataatttaaaaactagagggaggagagggttaactttgggaagagagttcagagaacctgagaatgtgatgagttgtccccttttccacccacactggagaggggcatgccaggggcagttgggaaggatcaggcattcttcccataaagtcgagcctatctctctatgccagcagaacatgctgcagggaggcacaattcccaccattctgacccaccatttcctaggtagtcaaacttagggtggcaagaacacctaagattcccacagtctagagaaggaggaagagctggcaaggacaaagaccagaggaaatggcctccttgtgcagggagagcccaccacccactgggatcaggagaaggtcctgttatgaggagcaacgcttgtgaatgaagaagggttctcagctgggtgcctgaaagccatcaaaaatgttccatgatcacacaaaagagtcttacatattttcattactgcaaaccagccttgaaaatatatgtatgggccaagaaaactttgcccaccgaagaagaacctccctgctacaacacacctgccagtgactgcccagtgataaatgcttgcaggccttgtgaaatgaggagatagctttgcaaaggggaccagagtaaaatacgtaaaaagaagggaagcccttatagagactttaaattggacagtggctaagactttcattcttacatgagattaaacaagtaataatagacagattgagtttcccagagtatgtcagctgtacacaggcargaagttaaaaaaaatacatgtggtcataagaatacatgtttgcacgtctgaatggtaagtgttcaaaatccactggatatgcatataggatgaaactaaaatatagatatgggagatcatacaacctgtttgtatataagtacaagaggaaaacatggccaaaaatatttgttgttgataaggaaggattttaacactaatgaaggaaaaggataaygagagatctgtgaaaggaaataaattatgtagatgcaaatgacttagtgaatggctgtaggagcaattttctaaatttgcaggtgatatttaattggcagacattgcaaacagcaaggagcaattcaatcagataaagaacttgaatcattaagtacttggcctaatagatggcaagcgcagataagtggtgaataataagtcttgaatcaaaactaaagaacagagagtgaacatttgccaaagggaatgataccatccaggaatggctcttagatttaaggagaacttatagacaaggacaaacaaaacttcagtaaaatattacaaataaaaagatttggtgggttacagcttatccagctgaagctgtgatgagaaaatctgacaacttaaggatagataaatcctgaaatccacggttggctattgaaattccatttgttacctagaatttcatctatccctgatcatggtttggagataaaattaatgagtaagataacatccaagcatataagaggttacagatttgggtgaggatactataaataacttttaaagacatttcggatatgaaattctctatgttctatgggcataattgtgaggtattgtgtttagattgcttggtcatttttatttaacatgccagttctagtctacgttagtctggaaattataaacatagagaaatatgctacaagtaaaagagaataataaaaatttattatagcctagaaaggtagttgatgcaatatataatatatttcctctttctctttttttgcaatggtgaatactttactaaatgaaaaggttaattttaatattaaagagaaatggaaacatcctttagtacaacattaaaaccacaaatggaacctttaaatattcactcactctagcaatcaatgttccaacctcatttaaaggattttttttaacttgacatacaaatattcagaatgaatatttggaagcagagccacgagccataccttgaaagataactgcggacttactcttgcctgccatttggrtacttcagatttcagttgttctaagtctcaatgatcctgagttttctttttgtaatttggtaattttgtaatggcaggctttaaaataagtaaaggttttcttaactaagaacaaaaaaaaatccggagacctaacaaggctcagctgtgtccaggtaggagatgactgcagtttggcttcagaggctccctctagcagtgtgaggacatctgagtgtctctcctactcattttatatttcatttgatactgcacagaatcactaggagaacagccagaattgatttacttctcatagagacaaactgtttctgggagctagttatcttcttattaacaaagagcttacattcccctcccctccagagctcctaaaacatctatataatagctacattaagtgaattctacaatgattgaaaattttactataatgaagataaaaattcactcaattctagttcttttatccttgatttgcatttgaytgaaatgtgtatttgcagtttgggcatttcagtcagcgattgctcctgtattctttgcccataagcagccttcagatggcctcttagaaaattgaagaagtctctacatgactggaaaactctttctgatggtctgtttcttcaaagatatagcattacctcttgggaattatagaaacaatatatattgttaagcctcttctaatgctactgtaatttataactggtaactttttcccccacttagcattcaataagcatttattggggcctaatgtgtaggtggaattttggagaatacataaagtatagaacacagagttcttgttcttcaagagctaagcagctctatagagaagagagagacagaacgacagagacagagacagagagagagagagaagagatcaacacatatccaccacttgctttactatctatacttcaacttttggtggactcatcccatcttatggattcaattatcatctataagtagaccacttccccaattgtttctttaacccagacctctcacctgaactacaggcttttattcctcacaatgccttcagcattttccatttctaatgggtacctcaaacattaagtgttcaaaactgaatttctgatttcacccctttcccccatccttgtctgttgtagtgtatggcaactccaattttcaagttactcagtgcaaaacctttgagttgtccttgaattctcttctctctgtcacgccttatatacaatgcatcagcaaatttgtctggctgtaaatctgaaatataccataaatataaatacgatcacttctcaccactcgaaagccactatttttctctctttaggactatttcaatggccctttaactgctcaccaagctactgctctttttcctatttctgttaaaaaatctatttttaacagagcagccaaagtgattgttttaaaatgtcagatcgtattacactctccctataaccctccaatagttttccttcaactctaatttacataattccctataatgccttatatgttcaattatatacatatacacttaccaccatctctgtgaaatctctttctcctacttccctagtatgagtattgcttaggtataaatcagaactcagaaaaataagagtaagaattaaaaaggacatatgtgctgaaaaaaatagagcaatgaataaatactggggaagtaattagaaggaagagattatacagaaaccataaggcaaaaagttaatcaaatttatcaagcatattataggggacatggccaactccacaatttgttcacctataatctcaggcaagctatttaccttgtctgagtcttagatttggcctcagcgaaaggaaagtggtgatacatcatgagcagggttgcagcacagctggcataaatggaggtttatcccacacatgtgggctgaaaatattagaatccaagctaccaaggtcagagtgcctggctaagagcttcatatggaaaaaaaacctttaagtcaatgacaaaatgggagagacttttttttttcaggcagtatatagccaagaatctattccttgaatgctggaattgaaggttatataaaagcacttattactaccaaattgcaaagmacaagcagagcaagtaagttgagagagagagagagasatctttcttggagaacatttttggaaaatgactgtgggcaaagcaatgtgaaaatatttagggagacagaagactacgaagataaaatacctatatcaagaagtttatattgaaattgagaatataaaacagatattatgggataagtcccataggagagatacagaaaaacagagaaatgaaggataactgtaaactctagggaggcaatgtcacaaactcaggtgaaaatacattagaaaaggaaaactaggtatttttcagtatatataatcaggctggaagataaaagctggttcagagactagtgaaaacaaatcaggctggaagataaaagctggttcagagactagtgaaaactaaattgttcctataaggactttaaaaggagatcagcatgtgagtagacttggaggcctgctaaagagggagctaggagaaggaatagcacgtggtttctgagaaacagtgtagcaataaggcttatcacacataaactaaactaatcatgatgtttttgtcactattgtgctgtcagagaaaaaaatctattgaaataatgaaacatactaattttgagaaacatcagtgtggcaaaacccaagaaacacttttcaaatgaatatactcaaattgcaagatcaaacatctattaattataataggtaagaaaaaggaaacattcaaaaaagtccttcaaagcgaaaatatgtaaattagagtaccttcataatcaataaacacttattgagcatctattcatgtgctatcaatgtgttaaaaatacaaaagtgacaaaaataattattgctcaaaattctgtgcagtatttagaaagattgggtagggataaacatgtatttctctaagattacattacattatgataaggtttatggaaaaaatgtacatacctatgtatatgtaaaaatagaaaagagtctaaaagaactttttcaatctcaaaacagtgtttacatatgaggaaatgtagcgatgactgttcattgtttataaatatctgttctctcctttcttagtaatacagctcctgaatcataatagccagatacagacttcccacaatatgaatttcccagtttctctccttagctagtgtggtcatgtgactaaattgtagccaatgatatttaagcagaaatatcatgtgatgcctctgagaaatgttcttaaaggaaggatttttattcttattcttatcttcctcctttcttctggctggaatgttaataggatgacttgtgttcaagcagccctctaaagacatgarttggaagctatgtactgaggagcacagagcaacaagagaaaataagtaaaataagtttggttcttagctctggaagcgtgataaacctgggatagtcagccagggaacttctttcatgttgatttttaagccagtgatattttgggcatttcttttacctgcaggaagaaaataggctgattttatrtaatttgaccctttaaaaactagaatatattcatacatagtttttacagttcagtgtttaaacttatttatttttcatcttagttttgcttccctatgttttgtaaatggtaaacttattagccattctgtggtatataaaagtttcacttttatgttttgtttttatattggcccaacttccatgttcagctaaatacactaacataatttaaattactgcatttcattgggaatccaagttagaaaattccttttcccacatttttaatacctaaaacttgggaaatgaataacattataagtacttgaaaataatattcactgatttatcatgtgtaagccctgtcgaaatatttattttctactgagcttggaagatattttaaaatgattccattaaagaaatttttaaaatttttgaaatatctatttacttaagatgttgaagaaaacataagcatctacctttaccttccattttttagatctcatatgatatgacaaataaatagaaaattagaggaaattttacaacagtactctaaattaagtaagggtaccctccatgaaccaggaattggcagatttcaaaaaagcacactcctaagaaatttctgtttttcacgtgaccctgacaaaatccattaattgtcctaatttggaagggtacaaactgcagaaaagagcagggtattagctcagcaggaagcataatatttcattgccaagttgctgttgtgactcagtagcagcacttctgttatcttctgcatggctcctcactcttcagcgagcaaattaggactcattcacatrgtgatccagggttcctggcacagcaagatagatggcaagccattgtgccagccctccaatgctctgtttgtatcacattgcttttctcccattgatcaaagcaagttcctggctaatcccaaagttaaaggatagggaaatagactgcaccaattgttggaagagctgaacagtacattgcaaaggggcaggaataccagaataggaagaactttgtggctatcttatgtaatctgccgtgctgatcagttagactaataaaccaagagaagaaatgaaggataataaattcaaatacctaatagagatcaggctgttaaggtataaaagtaaagttgggtatagtacctatgcacacaatgtgcttgaattgtgagagctaaagtgaattgaagatctcatgaactttccaagggggcactgtctctcaaattcaacaagttgcttgaaacagactccagcaattttcacatgaaattgtaagtttgaatttctatgtagactctactaattttgaattctggctgaagtattttaaaactgtggttgaacataaccacatctgtaagttacttatgaatcatggaccatcaacatgtgagttttgatagagaagactgaaaggataacattttacaactctattaaatataatataaatagtacaattaatatatattttatataaatttgtgtcctatagacactgaagacccataggttaattacaaaaattgataatacatcatgtgcctccaactccaaaatttatatacaacataagtaatacctaacaaattaccagattaaaacacaataaaattaagatgaataacattttaaacaaagacaaaatctcaaaccacttggaagtaaaaatagcaaatgagcaaaaactctcatacactgttcctagagcaaagaggaaataaaaactaaaagtatagactatttagaaaataatgataacaaaagcactacatgtaaattgtttttaaaactttgcttacagaaacgtgttcatctttaaactctacttaattactaaattaaaataatgaatcaagccttcaactcaataaacaaaatatgaagccattaaagcttgagttaaaatgcattaaaatctgtattttagaattcataaatcaatagggttaattgaagggaaaaaacagttctttgaaaagatataaaacaaaaacaagccttgggcatgtctggttttggaaaatgaaatgcataaataaaagtatcaaaaacatgtgtacaccacaattaagaaaaattttcacaagcatgatggaacagtaagtacaactttatcgtaattatttgaaagaaacgtatggcatgaattattatcaaggaaaacatcccatcattaaaattgacccaagaagaaatagaagacaattaaatatatgtccaatatgacaaaaaatgttatttgtttacaaacaaattaataatgttatctcctgcctgttttcttaatttcaggaaagagtaggccaaatgattaagacatttcataaaagttayccaattaattctgaagagctagagtaattcccaaaagaatggctgaaaatgaaatcacatacaaaaaaagaaaaaacattcaatatcactttagtagtggtaataaaaatacttattaagtgataattgaattcttttacaaaattcttttggatatgaatatccaaaaatcttaaatgtcctttcatatttaatccgtcagcatattagaacatagtaaagtattaccaaacagggtttattacagaatgagcttcattcaaccaaaagataacaggagaatctttggcaaaatatctaatagtaagcaaagttggagacatggattagataataatatgaaatcatcatgtgttctaaaaatgaaagaatggtattaaaaaatcaaaggaaaaggggaaagtaggggaaaataggatatcgtaatgcactttagggaataagtggaagtaacagattttatttaaaattttcaaaacgttaactggaaaaaaaggagtaaaagcataataaaatttttaaatattgaggttaaaaactataataaaagtgcaaatctttctagatagtaaaagaaaaacctaccaaagaaaacatgctacatagaaaaacacagtaaatataacaaaatctacacaataataaataacataaagaatagattaaataagatacatttttgggatatggatcaaacactacaccctcataatatgccattttctcaagcatacatggaacattgacaaaagtcaatcatatattgattggcctcaaagaaaacactattaagttccatttaagtactttattacaaatagtgttccctcatcaaaatacaataaaactagaaatttagaagaacagtaagagaaggcttttcacctgaaattaagaaatcatcatgttaaacaactgtagaaaagagaaaaagaaacaaaaattatctttaaaattagtggtaataaaaatactatatatcagaatctgtaaaggatacttaaaggcgtaattagtagtcttgggccctccccttcccttcccttccctnnnnnnnnnnnnnnnnnnnncttccttcttctccatctccctcctatttttcctccttcccttttttttccaccctttcttccttcctttagcatttcttcaatccttactttctcccaagcaaacctggaatctttacattgtaatattatttaaaagccaaataaaatcaaataatatttaagaaaactatcaagaaatttcaaatatttacaaaaatttattctcttgaacagcaagagaaggaaacagtttagtaagttagataggcagaagtagacctagtacttgtgaaatgtgtgccaaaactcttcagtaactattttccttctgctttctgtagaaaatatttaaagttgaaatgaaagcatttcctgaagtgatacgtgaattactacaagcaatatgtacaaaacatgaaaaacagaggtgatatttagtttggaattgtcatattcaaaatcagaaataaaattttcattctgatagagcagtgagtttgattttattctcagattaaattacagaatggattattaatcagatgtgttttagatgattaaaatagcagttcatgtttttgatagcattagctattcaggatcaaatgaatatctgattaaatatgtattttgagttcaataatgccttttacaaagcactttaaaccctatagacaaacgtggcttgatggcagtgtagtaaggaatatttataggtgattgaaaagctatatctaaagttttaactagtgagctatcatcaaagtgcatagaactttagaggcatattgccatactttgaacttgccaatgtatgtttcatcaatactttactagtaatgtgaatgaagaattaaaggcttgctcctcaacttctgaatggctcaaacatggtaaaataaagttgacataatgaatgagaagtatagattacagtagatgtgaaaaatacaaaagaaccaaagaatgaaattaaagagacaaatataaaatctaacatttgcttcaaytgcataagactttgtgggctactagtttgatagtrtttattttaaaaatatttttaaaattttatttgaccttaaatttagcataaggcagtattaaaaatcacctaataaaaatgatacagcctccaattttatttaaaaagtgtataatttatatcaattgaggaaactgattatttagactgtgttcacaggagaatgacaagtattttgagggacagaaaatcatatctttggaaaaagtttgaaagcttgtcatagggcagatctatttagattgataacataatgtatggatgacaaaactaaaacatctaataaagagtacagggaagcaggtattgattcattataaaatcaaagttttataataattagaatatttcaaatgcaaaattttcatcttagaaaaagcaactggacttggtgtaatgttaaaataatgcatgtaaaacacatgatacttggtatatagtaagcactaactaaatgcatactattaatcttaccaatataatgttcttagcattatattcaagaataaattagatctttagttgttacatataatcatttattttagattaaatttagagtaaatgtatttcaatttgtctaagcttctaagattcagtgattatattgcttattagtcatgctccattgtatcatccatccatatccttttcatgacttgagagaatgcaaatcttgtatcttctctcaaggaaaatattatgactatataattaaaataattttaaaaatgtatttatattccagttttagtgctagtcctaatcaaaatttaaataatcattttacaataaatatttgacatataatattttgtaatatattgaattttctatagtagatgcctaattatcttagctatttgcaaataatgtaagtgtaaatatactgataaatcaagaaccttactttaattattgacataattattcaggatattaatcttttatcattgctataaaacagtcaattttcatattgccattttctttttattatttaaatacctctctctgttgggaatgcagacaaaaagatggaagagatttataataattaggtaatataagtttagtaggggctccatctttatttattcatatattcatagcaagtatttattgaccatgaattctatgccagaaaatgtgatatgtaatttttttaaaagtcacaatccttgctttcatggagcttatggcctagtggaggagtcaaacattattgaaaagatcatataaacatatgtaagattgcagctgtcatagtggctaggaaagtgaggaatgtaaacttctgatagtgtaaacaaattattgttccaatcaaagagatagtggatagcttccctgtgaaaatgaaaatcaagctgacatatagatataaatgagtgtttacttgaagtttcaggagggtcaatccagactgtgggaacagcatgtacaaagaccatgcatcaggaagaactgctggaagggaaaatggtacagtatgaatatgttgaagcaggttggggatagcctacgtaaaggtgtgtagaccatgtttttaatctttctcctaagagccatgcaaattcattgaaaatttttaaagtgtggcaggagacaggatcagatttgctctatagaaagactactttggctacaatagggagactgaagaggaagaaaggtagatttcaggtagtcttacaaggagctggagcctaggaaaacaatgaaagctggaaatagtaaagaaatgaatggatattaggatgctcaggaggtaaaatcaataatgatagatttgatagggggcataggctggagaagataatgaagctaacaagttttatgacttatataaaaagacaccattaaagcaagagatgttggaagaggactggttgaatatcataagtatgatgttggccatgttaaatgttaaatttgaggtatttttaagtcatttagtagaaatgtcaattatgtagttgaataaatcagtctagatcccagagctcagatacacatctagaaataatacatttgtaaattgtgtgtagatggggacaatagcagtaatgaacacagatggaattgcctaggcagaagagctcaaatgagaaaaggatgtaggcccaagtccagagaactgctaacatgagcttgaaaaaggaactgagaaagaggtgtatgttatgtcatgaaattcaagggaaagttgtgtttgtgatggagggagaaatcatcaatgctaaatgtcaagagacctgattagatgagctttgaagtatatccactacgttcaacaatacaataattaagaagtactttttccatgaggaatagggtatccaacaatatggggaaaaagagttttctcagagtgactgggatatataaaaatggagagaaaatgtggtaatgtggagtaaccagagagtagagggaagggctcaatctctttgatttcattttaacaagaaacaaagaatcttttaatgggaaatctagttaataggatgatgttgaatgcatgagacaggaacttaagtatctgaaatagagagagattgatacatttaatgatggaaggttagccttaggaaaggggacagctcctgtattgtggaagcagataaatagagtagactgggtatgggctataggttggaacacagaaataagtatgatttttaatctcccatcttctatgttctctatataataacagtaggattaaagatgtgacaagtcgttgtaaaaagtggacaagtgagttgaccaaataaataaaaacctaagaagggtaagaataaataattgtctttgattatttctggttatgttgtttattgatatttaggaagttttagaactgtctttctgaattagtggtccttggcctttttttttttattatactttaagttttagggtacatgtgcacaatgtgcaggttagttacatatgtatacatgtgccatgttggtgtgctgcacccagtaactcgtcatttaacattagatatatctccaaatgctatccctccccctccccccaccccacaacaggccccggtgtgtgatgttcgccttcctgtgtccatgtgttctcattgttcaattcccacctatgagtgagaacatgcggtgtttggttttctgtccttgcttggcctttttttaaattttgcttcagtgcagcacctctaatataagtaaggactaccacatactcattatccattacagtgttctgctgtatcattgattctgaaggatggagtgaagcacctctttaggaagactatacaaaactcagagatgggaaagagagagagagagagagagagagagagagagagagagagagagtgtgtgtatttgttagaaaaagttcattatatgattctgatatgcctcccacagggaggctagaaatttctccttgaaaatagaatagccaaatgttgaaaatagaccagaatttaggaatttgtttatagatatatgacaagtaattgttaaatttaataaatagtgtagcacatacaaataatcagctcccttttcctaaataaaaaactttagctatttttattctattttaaaaattcacttcgtgatatttaaaggtatccattattaaaatcagtaaccattccaatttataatcatttaaaagtaaaacatataattatttattagaaaaatatttgtgaacattttataaatattatcaacatgttgtcagtaaattcctcctcaggtggaattttctgactttggttgagtcattaaatgttttgggtcactagtgatcaattagtaaattactgatccatagtactttaatggcctgaaaaagtaaatgcatcttctgagcacctaattgaatcttagttatttattcatcattaaaatcaagataaatgagtcagctcacaataatgaaactgaacagttacattcatttcacaaatagattaaactaaagctcagaaaagacgggacaagggagttaaacatccaggttagattttccatctgaaaagacccaattcccaatatcttgctataaaaattaaatacatatatgagtttgaaagcaatatttttctgcaagttcattttcatatagcgttattaagtttaataccattcagttaataattgtagatccatgrtacgtatactaatatggtcttgttataatgtaaatagtacagtttaaacagcaaaatttcacactgttttaatataaaaaatttcctagaaccaattaccctgagtgcctactatatggttcatttggaaaatgaatgatagctgcaatatggtaaaatgattatgagcacagccttcggaataagtaaaacatagctttaatatctaacttctgtacttactaactgagatctgaacaagttacttaaacttctaaggtttagtttctccacttacgaaatggagaggaaaacacataattcatagttcattgtaaggactaagtaaaaaaaaatacttaaatacttagcacagggcctagcaacaaagatatatgaactcggtacacacagacatacaaacacgtacccacactgcttaactttagctagaatatttttaaaagcattattagtttgagactagattcatccaagttggtttagcattctactagggatgttacttttcatatctttctttgtttttgttcccaaaagctataaacacaagttttatcttctttcctgaaacaattaaaaagaaaatacaagaaaatgttcaaaaaataatttactagtgtttttgtttgtctggaagggtcatcctgcagctttaatcacagctgaagatcattatttcaaaaaagacacatcttttagatatttaaatatgtattatcatattatgcagtttaaatgtgaagtcatctaccctctggtttactgagattctgttacattttaaataaatagtaaatgctgtagttaagagtgctatcactgagaatctaagaagacacattagaaagggattattactccaagaagaattctctttccttaatcattactttttcattaaaatatttctgaagtttatacaatacaatcatagtagtgaccttaggcatatgacaccttagtgctataaaaactctaacaaatctgtttagagcccaataatataaatttctgtgaagagaaatataaaccaatggtaaaatgccatgttgaagtttctaaatagcccacctagtaatttacatgttaagaacatattgaatatcttgggaacatgttcctagaaaagattctccattataagcttttcctttactgttaatgattgctttgataaaatgacccacgaaaaaagacaattttctccctgtgttatctgtgtctgaaatattcttcactgattttacatatgctgataatatgaacaaggtaatttgtctgactctggtggggcaagattttcagtaagaaatgcaaaattcacacatagctcttctgtaagaagtctatgcagtgtttcagtttatataaaaagatttatattgcctgaggcatctatttttttttcctcgaggcaagctgaagtggcacaaatgaaattgtttttcacactgttaatgtattcctttctctttcaatttctcagagagccgacatagggatttctgctttaaccatcactccagatcgtgaaaatgtggtggactttacgacacgttacatggactactcagtgggggtactacttcgaagggctgaaaagacagtggatatgtttgcctgtcttgcaccatttgatctctctctatgggcttgcattgctggcacagtccttctggtgggtctactggtctacctcttgaactggcttaatcccccacgattacaaatgggatcaatgacgtctactactctctacaactccatgtggtttgtgtatggatcttttgtacaacaaggtaaggagcaaaagtacattctagtatttaaaaaaaatagaatgtgatgtttccaaagccatgtattcagttaataaggttctgtatctgacatcaataagtgttctaaagggtactcacagaaatgctcagaaaagaacatttgctacttcctcctagtggatctcagacacaccaagtttccagcaataatggttcattgtcttttgatgtaagtttaatttcatcaacaaaggcaaatgtgaatgtcaaaggtaaagctcacagaaaacatcaagatcagattttcctctccaaactctgactttctgagaaatagccttataaggatgaaattacttattaccagagaaggtactatttaattatttacatatgtaagaaatgttaggacttgttctttgttcagagacattatttcatgcattaaaaatattgtcattgaaaagactttggttaatttgagactgatgagaaattttgtgttttatcttttactttgatatgtaatctttactggtgatttaacttacaatttcactattttctaaagaatgtcattgctctgttatttaatatccaatctgcccaactctttaaacttgtccaattaattatttggctctcactgtttcaaaatagaataatatttattgcattccttacttgagactattgcctcatagagaatgaaatagtaagaaaattgatagtctcttgcaagctctacacatatattgaagaggaggatgtttgctacaatggagacattatacttttgtgctaatatttacaactctcaataacatctttctttttattcctattttctcttggaccttccatttaacttcatttttctattctaatttaatcaaagattagtctagaaccttcatctgacttgctaacttctaatctagcccttaaaccttttgtaagcatgcttttccctccacccttccatatccagggctctaagcttacctgttactgtatatttttcacagacacttttagttctttcattaataattaattcagtaaatatttaatccacactatctaagtagaactttcctaagcaattagtgtatgatggtgagcaagaaggtctttgccatcattgcgccacaacagaagtctaatgagacacaaacatgtaaacacaggattacaattgtgggtagaaagtyctgtggtaggataagcatagactgttaggagatcataggtgtagaagcacttaatatatgttaatgtcgcagagaaggctttttaaagtaacactttatacagagagacagagttaactatggaaagtgcttcttgaggaagatgaatggagaaaaggagacataaacggttaggatggaatttcagaccaagaagtgagagagaaattaagatagtccaagcagagaggatctagtaaagatgaggctgaagctacatttgttattataaggagtttgaactgatccttgaaatgatcagatatttaaagataataaatgggaaaatacagattcaaattttactctagaaatattctggttataatgtggagaatagattgaaaaaaggcaatgtgaaaagtcagacaaattagaagactattacaataactgagcaaagagttgatgtggcttgctcaaaggtaaggtagctttgggagtcaagaggagagtattgatgaaatggaatcaacaggctttgattacctatagcgtggtgtgggggtcagtactgaagaaaaaaggagataaagttttatcctaggtttttgaatagaaaattatgtatattggatgtggatctcatttactgaaaaaataaaacagaaaaaacagatatgacaggagagatgatacattcattctgctgcacattgagtttgagctatccgtgaaacatccaaaagagtattactaatgtgtgcttagtggtttgatatatttgtcagatgcacagaagagacatctggacttaatatatatttaggagatattggaatgtaggaaattttgaagacatgggagttaatgagatcacacagagtagttgctcttaattgcaaactcctgattgaggaccactggcccatacaaagcctaggacagagctctaaggaaaggaatggatagaggagcactcagtggtgcctgataaggagtgactataaatgcacaagtgaaaatcagagcagctagtagtatacgtttggttgactgtgttaaacctttcaaagaatcaaatgaaattaaggcttgaaaggtttttgttggatttaacaataaatttattattgaagcaaaaaaggcttgtctttgccctatgatgtctgaggtttcagctagacaattcagaggccagaggctaaaatcatccaaaggcttgttcatttcactcacatgtctggtggttgatgcggtctgtgggctagtggcctcagctttttctccatttgggcctctccatgaggtcactttgcatgggatagtttgactttctcacagcatggtagttgctttctccacagagaacatcccaattaaagaattttatgttccaggttgggagtcataaacttgtgtgatggtgtgaattcctcttgcagagaacatcctggatgtacccacctcatgggtttttatgagaatttattaatgaatggttaaaattgtgaagttcttagatataacttatataagtgtcacataagtgtttactaaataaataaaacaatgaattagactcagcggcagataattgacatatgtaaaaaaagggataacaagacaaatgattgtagatcattttgatgtasatattgattgaaatagtagatcatggggtatatggagaactagaaagagaaggaccaagaatgcgaatgtaaagaagagtaagggtagaaattgatagagtaggcctggcatggtggcacatgccagcactttgggaggccgaggcaggcggatcacctgaggtcaggagttcgagaccagcccggccaacatggtgaaacaccatctctgctaaaaatacaaaaaaatgccaggcatggtggtgggcgcctgtaatcccagctactcaggaggctgaggctggagaattgcttgaacccaggagcgggaggttgcagtgagccgagattgtgccattgcactccagccgggatgacaagagtgaaactccatctcaaaaaaaaaaaaaaaaaaaaaaaaaaagatagagtagttaggagagagtagtagaggtctcaataagattacagaaaaagagtgaaaacataattataaatgagtttggagtctgtatttataaaataggacatctaagcctaattttttttgaaatgtaatagaggagaacatgttgtaggtatgtggatacaaattccagatgttaagatttggtgaaggacttcaaagctgatcaaggaactgagagataaagggttaggtgagccagctgtaatgatggcttggattagactggagaaaaagaaattgagccatgtgtcaaagttgtgaataaataaggaaggatgacaaggatgttgatagatatgagcattgaccagaaataggaggtgacatacctagatataattaacctctgttttcatcttacttcttccaatttattcagtttttcagtgtatgatttcaacaactgccaatatgctgatgactcccagatctacatcatctattcttgaacttcagatttgtatattcaactgttacctaggcaactctctgactataccagaggcaccataaatttgaacatgccaaaaatgtaattcattttagaatttgaaccttcttagcctctcacattctctattccagctgatccaccaccaaccattcagactcatgttagaaactctgaaaatagttttcatttcttcctctttctcatcttgtatatccaaccataatcaagtcctgtcaattttacctactaaatatttctagaagtggaaatctcttcttatctagaaagattagcctagattgtcacctagattgaggctacctcatttttcacctgaactataggagtctcataagtctttcttcttccagtgttgtctcctgcaaatatacgattcacatacttgcatatatacccaagttayccatgccatggaaagataaacacataattcccattcttcagttattttcttggcttcccaatgcccacagtttagaagtctgagttcttcagagcataaacaatattccatcacctggctcctgtccaacactcagttctcatctcttaccattcgtgcctcacatttaattgcccagttactccaaacttacggtttgaccataagacaagactctttcctaactcttcacctttgtatctgctctttccaattccttgagtgcctttgttaccaacctgattagactctactcccactctctgtctttatacagcaagttcctattcatcctctaattttttgcttttatttctctactttcaagaagtctttcctgggattgagaaccatcttctatactcctcaacatgtatttgtcatagtacttaccaaccatagtgtaattcctttttttaaacatgtctccacctgagtcctttgaatataagatagtgtactatttaatctgtgtagtctctttgcttatagttaagtgccttgtacatgttaggcatttaataaattcatattgataaatttaatgaatrgatgctaaatacttaactaaataaagcatggaggttagctgcaatattttgtttattarattatagtctcaaataaaacactaaaattatccacaaatgacttaaaactcactaaaccaaaaagaaatttatctgtaatgtccccactgagttgttgtaagaaactaagaggagtttataagtaaggcatcctcttggttgaagcctcatttgtgaagacgttgacatacttatgaattggctttctgaattcttcctccaagtgaccaaatttcaataagttttggagcacacccaggaaaaaagataaatagaattacccatatggttagcatgcttttctagttctataaacatgcaacagataacaaaagttataaatatgttaaatacctttctatcccactgctcccttaaatgagttgcacagcctgcaggttgattgtacatttatacaaatttataatgacagataatgctgaatcgcatatgattagctacttcatctttgaaaagctgctattmttccacttgctaacaatgaaaaggtgaattcattaaaagayactgagagcatctttatgctctgattaaaaataaatgaagaaaaggcttataaaccytatgaaaaagagaataaatcaatgacagtgtccatgtataggcaattgacttggaactggtgatatttccaataaaaatacagtcttttaagaggaagtacagctgttatttcagaattgcagtcttcattgagccactataccagattgaatagggataaagaggcatttcatgtgttatcagacagatttctaaaaaaagagttcacggacagccaaaagcagaaaaatgttaaatatatgtgagttgtttactaatcctgacattttaaaaaatctgtaacttcaaagcattctggaaaaatagctcagggaatccaactgtgcaaaagcagtatggtccattatagagataaactcagtacatctgtttggctggaacattaagagcttgtgaattaggttgtaaaatgcacgaatgagagaccaattttatacaacttttgttgtcattttatgtcctccgttatctccatgtstacatacatctcctttcaattaatattcttaagtgaaactggatttgatttttagaagtctcttatgtttagtttattggcagtgactctatcatctggtctccagaggacttcaatgactttgcaaatgtagttgtatgtaatttgctttctgtttacatgcaaagggaaatttcagaattatcttcagatgtttgtgtctgattatgggaaatagaaatatttatagtcatgtaaaatatttgaagcaaccacatatatgtttatttagcagcaagcatttattaagcaccaacaatgtgccaggaacatgagtagcaaaaggaaaataaggaataactcttaactagggtttaataaatatttcacgagtatactatgtgccatgcctggcctatgtgctttgagtatgatgctaaataagaaaaacagttcttgcaggagtgttcaacatcacgccgatggatcttaaccaaattgagatcaaaataaaccatttctgatgagaggagcagccagaattattgaaaagaataaagaaggaaaattcctttggtagttttcttaaagatcaaatagctccacagatgctaatgatgaatagaaagtgtgcctttaggagtgttagaaatactgaaaataatttgatgctgttgcacaagagttaacataagagacaacccactgattttgaaatcccaagacaatttttggaagaaaataaagagttcttcctactgtcagatggatcacactattatacagaatccaactttctcatatccacaaaaagaagagtcagacattcttttctattgaattaggcaacagaagagattgttgatgggagaccatctctttaaaactttgcacagaaggataactcaaaaagacatcaattttaatagtgtagatatcaaatatatgaaacttaccaatgtcctatttacaaactctcaaaggattcaagccttggaatgcagtagctaaagycatttctttatattgttacctaatatttcacattcaatttgaatataataaaaatgacattgactagctctgttgtttactgaccctagtgaacagaggaaaaatgagagtaattccccatgacaggttaactcgactacaaagacaggtttttttctacattgtgttcttacaggtattaaattaaaacagctctccataatttttatttaggctcaaacaacatctctgttgttgttaattatgattggcagtccttaacaaagggaccaaaatgcattctgagtgctgtcacatccacttgagaattgccccatgctgatttaaaacatgacgaggtgcccattttctttctttttatcgcacaattcttcacaactaataaaaaaaaagttgaactttcatgctgaaagtgaatgttcaaattctaccaatagtgaggagtaatttgtgtactagaaaacagtgccatgattttaagctgtgaatgcattggtttacattcctaatgaactgtgatgaactcctaagcaattatgctatgaactatatgcatactatatggccctgaaaattatttagcttgataccgactcctcatgacgtgagtcagaaaattctttctcatgctcaactgggcttttgaagagttaaaagaaatcaaagaacatgaggcagaaatcatatttctacttataaaacaagaactagtacaatcaacatcttctttgactcctttgaactacctgtgaatatgttccataattaaaattactattttagtatttaacaaaagaaagaagctgtttcctaagagacactaaaaaattgaagggtgattttgagaaaatatttttaaatctaaatttaaatgatagaacaagcaggtgctggctgggcgyggtggctcacgcctgtaatcccagcattttgggaggccaaggtgggtggatcaggaggtcaggagatcgagaccatcctggctaacatggtgaaaccctgtctctactaaaaatacaaaaaattagccaggcgtggtggcgggcacctgtagtcccagctactcgggaggctgaggcaggagaatggcgtgaacctgggaggtggagcttgcagtgagccgagattgtgccactgcactccagcstgggcgacacagcaagactccatctcaaaaacaaaaacaaaaacaagcaggtgctatagattctttaaaatagtattgtctgaaatctgagtagaactcagtgtttttacagtaccatattacaattttttcagcttaagtagtaaaaatgggaacaaacatcctcaacataaacttatcctaaagctgatttaggattggtctaagttaaagtattgggctcaagggaaagcaggtggtggtagagaacatcatttaaattatttagaatataaatttgaaaattcaatttctgtttgacatgcccaaacctgaatccatttccccctttgtctatgaatatgtaattagaggtttaataatgatggctatattttttaaagcatgggaaactgaccagagccttcaaaaacaaagtcaacatgttttgaaaattaagactgttagcatttagcctagctctagaatgcatccttaaaacccaattatcatggacataatactgtatttaaaatccccatcttcaactttaaaaaaattgttggtcataaagtccttgtgacattttgttaaatacccttgaaagtggtacaagctttacttgattgtttttcacatttataaggcagaaaaattcaatgtttaatagagaagtataaatacacattatgtatctcattatatatatcaatgtcactagtgaactacatttttatggcaatttttttcttttttgtgtcaaaatttaacaaaagataaatgcatgacccaccaatgcactgtagacacataaaattgttctttgattttgactgtgcccaaaatttatagagtctctttatatttacagctctttatcttagactccaaattaacaatccatttgggattgctgcacagtgtattctatctgcttcagttgttttctagcagttagtgtttatatccgttgtttaagctctactttagcatgtcctaaaagtatatcttctgcctttactattttaaattcttcattctctagtaaacaccaacttggatattaaacaagaattatttaactagtcacagaggtgaataagacagcatgatggctgttttcatggagcttagaatacacaagtgacacaaactaggaagcatgcagctccatcatagaatcrcaattgtcatgctgaggaaacacaagacaccacgaacatggaattcacagatatcctgctatttagcgtactgcaactgggtcaaatacatactaagttgtgatactgaaagagaggaacacagaccatgagccaattttttacctagtcacaaaggaagaaagaaattgttcaaataactcacttgatctttgcttcaatagagtgtcagattatttaaaattttcttttatctataaaaatgtaagattcagtaacataaatatctaactaaactactcttttcatgtctttgtgtttccttaagagacagctcagtttacaatcctgttttttaccacttactagctatgtgacatttgacaagttttttaacctctaggtgactcagttcaccagataataattactgacttcatcaggtgtttgagaaaattaaaagaactcatggatataaaactattagaactgtattcatgacacaaartcggcacagaacattatagttattttttcctcactgtttccaaaggccacggcaagagatagaatcagccatattgtttaatccttcaatattcatcattaacttccagaaaataagcattagtttaaaaaagcatagtgtaatcaagcataaggaaatatattaggaaaacttgtttagctaatgaaaatgtttatagtaaaagccatatgctaataaactcacaataactttatgtcattcaagtaaatatgaaaaactacaaaaacatttttccctatttaagcatgtcattactacatgtttttataatagactatagccaggaatacaacaaattaatgaacccaaattgagtggaattataagttgtgattcaagatgtttgcaatttatatagtaaattctttggggctcataaagacttaggttttggggggattaatgtcctataaaaacagtacacttagggttttgttttgggaattatatctcgagatctgcaactaaaatagcacaatattaagtataaacattacaggaaggctagtttctaaactaagcaatgttcacaaactgccactgatggcagtstgaaaccatatgggctttttccagctaaaatgatgatgatgatgctgaaatttcattttttattttgatattctcatagtattgatgcagggcaggcaagccccgaagtggagcttagcctgctgggttcttggctttgctcagggaagaattcaagggcaagacagaggtagaagaaaacagctttattgaagaggcagtgttgttacagctccatgactgcccctgtagagcagggctaccctatgggcaaagagtagcagctcagggcagttttgcagtcatatttataacccacttttaactgcatgcagattagggggcagtttatgcagaaatttctagggaaggggtagtaacttttggatcattgggtcattaccatggaaaggggcagtaactcccgagtgttgccatggcagtggtaaattgacttgacaggctggtgggcatgtctgatgacaagctgcttctgccccggccctgttttagccagtgcctaatctggttcactgtctgagccctgcctctggaattgaatcccacctcctacctcagtatcaatactaaaaactaaaatgttttataattttaaaacatgttaataactatttgatagtttaatatgttaatgaaactgaaagcagtcttgtcaattatatagaaacataacctatgttaaatatagattgaaagaaagcctttaagcttaacagaattactgaactctggtttcattgtaaacttaaatgtaatacatattgtaaatacctatgaaatacaatttaacatgtaagaaagatataaagaatcttgctaagtatctattcccactattttatgttattgcaacactaaaatataccatgccggatctgaaaacaaattctcagtaaccagtgaaatttgtttctttgatctgagaaaatcaaagttcatgatagtattctgagttcagtttgaagtgaagaacatgccatgccagattgcaaaagttggttctggatttaaaccatctttgacattatttaatataaacaatctgaaaataatttatactattaaaattattgaaaaggaaaattatctttagatgttttttccaaatactgttttaataccgattttgctgagaacaatgaccaagttcctaaatcagcaaccaatttttgcctaaagtaatttttaagaagtctgtattttatataaaggtgattcaaactttgttggcttttaaattttgaaatagtatgacttcttcacataattatctacaaagctataaggaattgttgatggcattctcttctaacttagatcctctttgatatcattatagtctcttctaaatataaaagtcattttgctatatcagcagggactgtctacaagtaccacgcttctgtgctattgttgtactgattaaagggttaaggccacttagcctttagtcctctgccttacatcaccacccaaggagtgctataatcctctagaaatgcattgcctgcagtgtggcactgcttaataaatcactccatcttatttatctttctcttgacatatagctagcagcaggaaccattatcctatgacaatgttaagttctattgacattttctcttaattaactacactaatttttacattggaaacaaacttcctttatttaatgctatcttaaacaaaggaagtgttaaacttgtcatacctgcatcatcataacatgttttgaaataagtgaaatgtctttgttacctttccagaagaccagtttattctgctgagaaaacaagtttgtacttatagaatcatattgcatcatttcttctaaactcattagacatcttaataatatataagagccccaaaatatatgtctgaattcctctgtgatacatatcccttcagtcatttgaacaaattttatgtacagtttcataaattgagaaaagcatttttttcagattaagcatgtcttacctatcttagaaccaagcattttgggtctaaattaaagatcattcaacagttagtgtatgtaatgtgccaggcactattcaagctgttggggctgtattcatgagaaaaacacacatatattcatgccttcatggagctcatcttctagtagagggagactggcaacaaataacagccataataaataaataaataaataaactacatatatcagaactcaaatgctatagaaggagtagttcagagtaaggagaattggaagtatgtatggaactgttacaattttcaatttgttgcagtaagcctctttgagaatttgatgttgaacaaaatcctgaaggataggaaggaatatactttatagatagatatctggaggaaagatgatcaggtatagggaagttcaaaatgcaaaggttctgcttgaagaggccggaagcatagtttagtaggaggtgaggacagagaggtccatgagttcagatgagattgacctttgtagactttcacatttactctgagaggaatggagaattatggagtactttaagcagagaagtgacaggacaaacattaagacaaatatatgtaattgtaatgggaggcattgacaaacttttctagagctattctattttccacatctggcatatttgaggatttaatatttgtttcaaaaaatgtagatttgtatctaaaggagtcatgattatattttataggtatacaaatgtatacatgtttaggtagatacatgctggttgcaaaatatacccagccrtcgtacattttaaaaaactttaactccaagatctagccataatgttttctactctgcagatcagacacatatggttatccattwtggaacacatgttaacaagtaaatcaagagatacgtctcattcccagctgtatttgtggtgatgactcctgaagaaggccattcttttctgataaatcttccctggtgcttttggtagagaaggtacagagagaaagcaaaagtacaggcattcttagyttatttttttcttctcaatcaacctagtttctttctgggaagaataaatgctatttcacaaaatcagtttaccagtttacttgaaatgtatttggaaagaaatatacatatatatggtaaaaaattctttgctacatcaaatcaatctactaataatgcctttcagagtagaattaaataaggctttctttttagaaaattcttcctgaaaagaaattaaattgaatatttttattatttttatttatttaaaatgtatatataccttctatttatccataaagatcttaaaatctgctaacattcataatagcagtgcattcttttgcttcactcacagaaaaaaaaatgaataaccttctatctccaatcttccttaccaaggccaactctttccatttaaacatttcttgatttttaaatttgcagtcatttggccacaaaaggccatctggagtataagattaaatagacactaggttcaaccacagtaggaatctgtaaactcagcattatcctccagaaaaccttcctttgaaaatgatgtacagttcttctattagggctgcacttaatctctaagctatcggaaaacaaggtcagatcttctgttgacacaggaaatagtgcaacyggtcccctgtagttattgcraatagttgtatagattagtgaygtttctgaaaaactaaatatttttaaatgggtctttaatattcagtcctccaaatacagaaaaaggattaggttaaaaagtgaaaattaaaatgttcactatgatgttcattgatttttaatttttccttctgagcttgtattgacccaagtgacattctacaaatgctgacttaaattaggttaagcaagttgaaaattacatttgatgacctgaataattcattaaaaaggataagcatataaaagcctactttagtaacacaaacacattttttataataatgtaagatattgaatctggccacaaacaatgtccaggatggacacttttaagtcggaatgagtaactttcttgctactaaattatatacagtacatatttaactgatgaaccaaaagagagtaatttggctaagtaaaagtcattcccagcactaaaaggcaatttaacatgcatttacccccaggaaacttagaaaatgaacagtaattgcagaggtcaaacttgtaagctggctatacttacttgtttcactccaagacttgacagcgatgcaatttaatcctcaaatctgtgactacctgagactatcattgaattgagggagcttatcaactaagaaaattaaaaataattgtactagtttatagctcaggtgtagataattccatataccaaataaatattatcgtgatgtgttgtgagtttataagttaacatattacatacgtgtgtgtatacgcacacatatatcttatttctcctttaggggacgatctctccctgatttttcaatgtagtttcataaactttctaacactaattgacaaaattaaaaacaaatattgtgtaatgcacagatggcagaaagtaagcaaaagtgtatgatttcaaaaacaaaaatctacagatatattcttatcaatttatttttaaattttaagtattagctaaacagtcttattaagagccattttcatataaaatagtacattkttatattttmttttctgttatgatattgtaaaatgtggctcattcttagtgatattaaaacaaacaagtaacacaatgtttgttagacgtgcatttttgtctaatctattttacaaatcttttagcaatataattaaaaatatttgaaatcagggaattcaaaggaagtraaggaatgagaaaagcctagtgraataaagatattataaataagatattaaaatatagatttaatttttaaatgggagcatctggcatgagtgaaataaaatgaaacaaacctcacggataaaactttgttattaaaactcttttccttccttcttttgcttctgtgcagatgatattttgataatttcctctgaaagtaactgaggctgtgctgcttcttatagataggctgcaaggaggggaaacccattatctttcaactcttaaactgtctcttcataagataagcatttcaaaaattgtattccgtaactccccttctagtttttatccctcagtttttagttgactaaattaccaaaaacaaaagtgatggggcaaattctataataggtctgaggggtctgaagactcaaatgaagcttacagagatcctaaccggatgatctagtacttttgatctttgatttggtgtgtaattggttatcaggatttgtttgctagaaaatttacccttaacacagagaaatgtggaaattttagcttgaaacaattctcaagattatacatacttttcaagtttaagacatattccttattcattacttaattcattgttatttcttctcctgaattcaatttttttttttttttttggagacggagtttttgctcttgttgcccaggctggagtgcaatggcgtgatctcggctcactgcaacctccgcctcctgggttcaagtgattctccttccttagcctccaaagtagctgggattacaggcacacaccaccacgccagctaatttttgtatttttaggagagacggggtttccccatgttggtcaggctggtctcgaactcccgacctcaggtggtccgcctgccttggcctcccaaagtgctggaattataggcttgagccaccttgcctagccttgaatttaatattttatttatgctgattgaagttagaattttggccaggcgcggtggctcacacctgtaatcccagcactttgggagactgaggcgggcggatcacctgaggttgggagttcaagaccagcctgaccaacatgaagaaaccccatctctactataaatacaaaattagccaagcatggtggcgcatgcctgtaatcccagctacaagggaggctgaggcaggagaatcattgaacccagaaggcggaggttgcagtgaaccaagatcacgccattgcactctaacctgggcaacaagagcaaaactccatctcaaaaaaaaagttataattttatcagcagatgatctctcagggtataacttttaaccataattaaagaaatgttagattagactttatccatatacattaaaaatatgaaatactactgaatatatagttcctttatttaaagccacaacaagagcatttcattcacatagctaaatgatcaatgtggtggatattctccgtatttatcaggagtttaaaaagtaaacttatcagataaaaataaggaaaaagaatattccagacatttcaaagtttaagctggtaaacagtgtgaggatcccatttttgcatatgaatggaacaaaggttggagataagactagagaaaatgttaggggccagattgcagacatgctcaggtagaacacaaagaaaatcgactttatgttacagaagatagatattcattaaagatgtttcatcatcaaactggcccaataaaatttatgttttaaaactgggctctttgcagacagtatgaagcatgatttgaaggttatgagacttgaaatagaatagctgaagtaatgcaaagctgaagaaaatcagccaccaccactaccacaacaaaaacagaagaaggaatagaaaagagagaataaaccagaaacccacacgacagggcttagtgcctgatggagtgtcaaaaaacagtaaatatattaatatgtatgcaacagtagtttcatactgcatgtaatgctattaaaattaaattactagtacatccttgacatctattttttcctttaactattttttcctgtaacattatttactgtctatataagactatattatttgtatgtgtgtacataaatataacttctttgccaacttcccttttattatatgtttatacaattttaaaaaatcattctagtggttcaatctttgtgcacatccatggtcattttctgaagaaattatcctagatatgcagcttctgagttaaatgatatgtatgcatctaagacttgatactttcagcttaacattgtaccatacttcatatttgaacatttcaacaattaaaatcacataagttttaatagactttaaaaatatttatttagaaaagtaatagtcaattaaaataatgtaaaattcagctttacattactgtgtcccactagatattgagaagaagcttaagtacattcaaacagttgaaactacttggacataaaacatgacaactctgcacaccttaaaaattacctaaatcatttggacaaaagtgtttgaaatttgttgctgataatgtaaatgttaaaaacgtaggcaaaaggcaaactgaaatttagctcaaacctttatatgtgtattgttggtgtttataaaggtataaaataataccatgtaatgcaagaaggctataactaattcatattgcttcctcagttaatgtcttcacataaaaactacccgagatgtctattttttgaatagcagcttgaattttcaaatattgtaagagtctcttgtgtattgccatatgtgcataaaaaatttctaagtctgtgaaacttggaaaaagcagcaaatacatatttttttctattttcaataaatttatgcagagaagtagggtgaatgaatgccttttgggaaaaggaaagcaaaaatataactcaccattttgtttgcatgtacaatttatacattgaaagtgctattcactagcatataatctattatatctaagattacataaaaagttatttgcctaagtaattaaaaaagaaaatataaaaacaatttataattccaatactgggtgcttagaattttcttatgattcaattaaaagtttatatactactactaaaatagagaaacgacaaatgcatttgttgagttatcactagaacatgaagttaagatatgtagaatcacagcctgcctcctagaacaactctgaggacagaattattcacctattacttctcttacttgtcattagaatctcttgtcattgcaatatcaccttccatctattttctttacatcttccaggatcatcaattcattatattggttatgttttaagttgactgctttttagaatcatctaaataacttggtctaagtaaattatttccaactcaaaataatggggagtttttctgagtcttatagacaaactcttattctgtttgttttaaatttatttgcttgaacctgccctaaatttttagtgtaggaagcccatgatctaaacctatttattctagtcattgaggagaatagagggagaaaacgaaatggaaataawaaatcagaacccttggtggaagaaatggcgcatgtacttggaggcggagacaccaggaggcttcctaaattctctgacatatgtcactccctgcctggttttctcccttccctatgatagcctgtgatcatatattgtattatttccccactcctctatgatattcaccttgggttaggaagcccaatattgcttttctagtcataccataagcctgttgtgaagattaaataagaatacagttctaaaacacttaaaacaatgcataatgccttagtaaatacttaacaaatagaggctttcatattttgtttcctgacctttgctttgtaacctcctactctctgatcttgacctgagtttaataagttttttgttttgttttgcaacttcaccctgatccccttcctccctgagcctacttcctctttgttacatccatggttttgatttactgcttcagcccagtacaataaccttgtttcctgattttcctactgctcatcaattcaagtccctaactcagtgactccagaggctgtaagttgaaagtgtaagaacttcctggaaaaattattttaaccatttttaaatctcttattcaaaagaatatgtggaaaagaaatcagaatagaatcaatttttctcttcaactctttaaaatactctcctaagaacttaagcataagagctctgtaaaactgaaaattacggaagaaaattcaaaattaggaaagctgatattgttttgtaagactagattcataatgttaaatgattccctttttctctatcaaattataaatctaatgtatgctcaataaagtcattttaatttaaaactaatctccagtggtggttaacaggttgctggttttaaatgacattttggaggcttaaaaatgtattttagacttacttttggctcttttatcattaaaactgattgaaaatgtattggcattctctgaccttttagaactaatgacatacttatgcataaggcctagtttagtaaccaacctcagaaattccaaattaaaaacttcactttgagatccatttcactttgattcctgttgacaactgctgcttaccctttgaactttcatgcttctgggactggcaaaatgggtgcaattttcctcagaactactgattgattgaatctctgaaaaatggggttgctaatggcactagaatttatatagtggttttatatagtggcttaggcctcactataattattttaaaacattaaaagctaatggatcactacagagtggcaggttctgactcaactgcagtcttgcttcatgctgtttgacaaacgactagtcatctagacaatatttactgtttcggtgcctttcccagccctcatttcattgccaggtctgtggtaaaatcagtaggttaaaaaaaagtataaaaagaaaagagaataatttttgagaccttctggaaagtagcatttgtatatatgtaaagaatcatactatattccttattcaaaccatgcattgtgttcttcttttggttggttgtttactttattggtgagcaaataggcaattggtatacaatgatgtgttaaaagtagaaaacaaaacacctacagtgtaaatcaagtaatttaatacacagaaaataaataaaaaatacatgaaatgttaaatatggtggaagtgagaaaaacacagggatgatatataaattgtcttttaaaattgcagtgtatccctcaatcatactatctgaaagctttctgaagatattaagggatttgtttgaatatctttccctcttttcaattgaatttctaaactttcaaatgttttaattttgtagtattagataggaaaatgctttttacgatacatttaagcctttttccagaatcttagccttacacccttataaaatatctagcatatctaaagccaaaccaggaaagaaagaatgaggctacttggtttctcctttttattttttaacaaaacttctaaaatatcaaaatggaacasatataagagcgtgaatacaaaagctgaagatatttctaaatatatgtgtgtggttttgacaaaatgctacgtagtagaaacaatacatgtgatgggaagtattctgggagtcaataagtgtttgggacatattcctccattgtttttgaaacttatatcaatgttstgaagatatagtcttatttttrtcattaacatttacaaaggtagttttgacagatactggaaatgagaacagaaaaagaaatamacaaatacatttttgttgcatataaaaataatgggaaatttaaggaagacatgtggcagactggctgtcttaatccattttgtttcactataagaaaatatcacagagtgggcatgatataataaatgaaatttattttatagttctggaggctgggaagtccaatatcaaggtgctgatatcttgtgagggccttcatgctgcatcatcccatggtggagggcagaggggcaagagaatgtgagagagccagagaactttccagaagtagccagagaacaatagaaagctgaactcacttttgtaaaaacctgcacttgtgacaatgagcctgctcctaaaataatgatattaatctattcatgagtgttctgcctgtatagcctaatcgccccttaaagattacatctgttaagactatcacaatgacagttaaatttcagtatgaatgttcggaaggtcattcagccatagcactgacccgttctgctttgtgctaaacctgctttgattatccattaatattgtgagatgcaaacctatgaattagtggaaatttcaatgaacagccacaaatactaccaagcctttcgaccaaaacattcaatttcagatatttagaagcttgtttagaaacactctcttaaaacagataaaagaacttctaatttcaatgtcatttcagaatctataaaaaagtaaacttaccaattcaaaatggatttagcagtcccataaaaaagaactttgctaattaatgttctggaaaatttatttgcctgacccaataaagttcttgtataacaagctactttcagtggatattagtgcatttcattcatactatgatcagactgtccagtagaactgaatgcaaagcaattagtgcaatggaggaataaaaggctttattaaatgagacctagagatagaatttacagaaagggtttctaaatgctatcactgccactatgcttggagacaggaaagttaatcaatttgcggtggggaattaatgataaacattatgtgtattactcacccatatgttcttaacattgcacttaagagagtttatatttcaatgcagcacttacctcagtattttttactgttacttaacatacaactgtgtcaaattgtaatgtagcccaccttacaaactggaaacctgaaatctgtgattgatgttcaatgggctctttttttccctagctctttagaaacagtgggaattttatacaggctagagtaacaaaaacattgtgaaagtaagaaactgccaagtaatatgtttttgtgtaataaaattcaatttagttctaatatgagttatagcaattggcacttaaaagttaagttaaaatcagcatgtaaggtttatgtgtggtaaccagcacccrtttaatttgattttaatttttaatttagcatttttcatatctgctcatcagaaatattttatggtattgggtctggtaaaataaacttaactgctggtattaagtctgaagtttcaaaaattataaagatcgtctccttctgtaggaagttctaatttgaaataacatatttttatttgctcagaacattcttattttaagtaaatatgtatagatggcatttgtatgtataaaagaattctattaattttaatagattaaatatgataaaatattaaattatataattaactacataacataaaattaactaactacatattaaattaacattatgttaatgttaagtataaacattttatattttaactgttaacattaaaatatattaaaaactgaaacgcattattcaaccaacatggaactcttcaaactagaaaagcacaaataatataaaagtggtggaaagaaggaactgctatttataagctttacaagtatcataatgcctatgacatgtaaatattaagtcagagaagtctacaggaaattttcatttcaattacatgatctaatgtcttgtagccttcttttgcttatttgcaaatagacctatagccagtccataacaatatttagtcatttaaaaccaactgaaataacaattatattagtcagattatcaagagagacagacccaataggatacatagaggcgtgcattgaggatattgcaggttcagtttttgccaccacagtaaagcaaatatcccaagaaagtgagtcacacaattttttttaattttccagtgcatataaaagttaggtttacactatactgtattcttttaagtgtccaatagcattatacctaaaaagcaatatacataccttcattttaaaaatactttattgctaaaaaatgctgatggagagacatgaagtaagcatgtactgctggaaaaatggtgctttgcaacacggggttaccacaaagcctcaatttgtaaaaataagtttgtaaaaaaatgtgtgaagtgcaataaagtgaaattcaataaaatgaggtatgcctatatatagatagatagagatgtagatatagatatttgagtggggatttattagagaaattggctcacatgattatggaggctgagaattctcatgacaggctgtctgcaacctagagattctgaaacactaagaaaagcctcaaaaccagggaagctgatgatgtaattctcagtcccaggccaaaggcctgagaacctgggagtggggatggggcggggaactagcataagtcctggagtccctaggccagaaaaccagggatcctgatgtccaggggcaggggaaaaactgtgttttagctccaggagacatagagagaagaaatccttttctctccttttttgttctatctgggccgccagctaactggatggtacccacctacattgaaggtgaatcttcctcactcagtccactgagtcacacaccagtcttctctggaagcccccactgatacagccagaagtaacgttttaccagttgtctgttcctgaatccagttgacacctaaaatgagccatagcaaaaatagagaaatgacattacctatcactattttttcaataaatcatgttataaaatgtgcttgaaaattctctttacttgtataagatataaaaaactaacttcattcacaaaatagcttttcttcatggattctgtcaaaagaaaataagtcaaaatatttaaaacattacatgtttgaagatgtttatagcaatgtaatatgtgatagaataaaaatctccaacttttctaaactaggagaatacttaaataagctatagtagaactgactgagcaatatcattcagccattgaagatgtagtaaataggatacaaaattgtatgtttgacctgaccattactactgaaaaatcacattaaaaatgccaaaaaaggacatatcaaaaaatgctaccttgaccccttcttcagtattgggcttctgaatatatacactgggttagttctgggaactagataagaggttccaaattcccactcagcaattgaggctagatttctgccttcagatgtggaatttttctatccatacatatcaagaagcaccttaatggtttataaagtataacctgtaattaatagattgtatattatgtaaattatgtaaatagaggcacctattttatttttagggtcactgtgatcaataagctattactatagttctctgaagataatacacttcaattatcactgagaaacagccatgactcactgtggtaattttacctcatctcttatagttagtcatccacaccacgcctttacctgggatactgctttcattttggatcaagaaatgcaatttattgcaggattccccagtgttatctgagacttcagaggagaagcacacagaactcttcagagatacttgtgttctgcccccttccatgcattttttaatgtctttgtgtagggattggccttctcatgtaagagaggtgaccaagtttcttggaacagattcattccaacattcccacctccctgaatctctacagtaggccagggaggttgtatataggttattttcaaatttcatgcatttttggttcattctttaattagccaatctaatgaattactaccaccccctgcccaagtatcaagtcagcacattaaaycccaaatctgaaatcttaccacccatgacaatatatttgccctaatagatacttaatgtcatactatttggtgtaaacttttataagtgggctttatacttctttgactcaattattttgggacctaatttgtagcatggagtcaataaggagtaacgtggtgagtccagaagagatcygtgaaatttcctatgtcaagttattgaaaagcatttgtgcagaagaaggctgattccctcagaagtggtgagaggttgcttccaataacaagaaggttcagaagaatttgaaagttcaaatttcttatcaatgcatgagatatcttatatggcagaagatttaatcagcaattaagctgtgctacagtcaagccttaatcttgtcctcagcagtatctaccctaaaactacaggataaagagagttcttcaaaactgccatcaagatattaaaattttaccttatttctgagctaggcattcatggccttaagtttctcatttgcactctgtattcattcggagacttcagagcagttagctggaaccataatcttcaaaatcactattattgccatggccttgcattccacctgcacttcattccatgccaactctggtggttatttaaacaattrtaatgtaaccacaggctgtaaattgtcacagttccatttcccatcaatatgtgctacagagatatgggagcaatccaatctcagaatctcatttttatggttctgtttcaattactaaatttaagaaggaagtgtttctaggagggtggagagggacagcaaaaatgagcagggtcagtgcatcttagatcccagagggattgcaggcttgatggagggaggaaggtcaaaagattgaagatggcataggagattggaatgcttgaaattcagattacagaagggtttatattattcttaataatggtaatattcactaatgcaacttaaaaggaatgtcattgcattcaatagaaaataactataaaatacatttaatgtaaatgaaacattgaatacaaattagttccattgaatgccaaaaggagtttgagatttgaattttctttgtaaaagtaaaatcaaaatttcagaaccttattatctgaggctttgttcttaccatgatattactgggtatatacccaaaggattataaatcattttactataaagacacatacacatatggttatcgcagcactattcacaatagcaaagacttgaaaccaacccaaatgcccatcaatgatagactggataaagaaaatgtggcacatttataccatgaaatactatgcagccttagaaaagaatgagttcatgtcctttgcaaggacatggatgaaactggaaaacatcattctcagaaaactaacacaggaacagaaaaccaaacaccacatgttctcactcataagtgggagttgaagaatgagaacacatggacacggagggaaacatcacacagcggggcgtgtcgagggttgtggggcaagggaagggagagcattaggacatatacctaatggatgaggggcttaaaacctaaatgacgggttgatgtttacagcaaaccaccatagcacatgtatacctatgtaacaaacctgcacattctgcacgtgtatcccagaacttaaagtataataaataaataaataaataaattctaaaaggtaattgtaaatggaacaacttactcactgtaacatgatgtgatttttgtgctctctctccctaccacaaaaagccatctcttatacccatgatagacatgtcatgttgtagaaaatctaccctagcttgcaaatgggttcaatatagtgaacccattatcctgtggacaacaggaaaccgcacttgtatctcttgttcacttccttattacccccacatcttctgtcaaaaaaataaaacacttacagatctggtcacagtatctctcaatttgactatcaataaactttaagcaatacttatataaaggtgactggcataaatgaagcatttcagagatgatatatacattatctcctcctatctttaaatgtagaatatgcttatgctggcaatgacttccacacaaattccaacaatatcatctttctttgtttttctacattgtgattctgtaagtgtaaaacacgctaatatttatttacattttaattgatcagcttacatgaactattcagtcagcttgaataatgaaaattttctatttactatgagtttttagccattttgttagtaacctgtttccaataaagatccaactcttgaaaaaggaatgtttattttttwaaaaaaggtattagttttctcccatttttttctaattataatttataaaataatcccaccattccagattacaaattaaaaatgttgtgagtgtttaaacctataagaagtggatttaccaaacaaccaaattggagactcttcaacaattaattgctttttcatatttcatggaaacacaaagatgcatatatactcacacagaataagacttagaataacaaatttttgcctgactcagatggatttatcaaatttcccaaacttgcctgaagaaattgcttatttttaacaacttttttaagtaagctaatgtatacagtagcaaggttaatgtagtttttcatgtggtaaaacaatcacatcaaaatgaaaatctggtcaagaggattttccttaaaacagaggggtcctttggaaaataaaaatttttcatgctttagcagagcactttaaacttatcargggctataggaatccaaatacccaacttcagagtcagacctttgcacactctgaagtgtcatgaagtatcagcctaatttttgcaatacttttttagcaaggtgagattatgttttttttttaatttggcacataattattttgtcctttacctaattctctcttctggcatcctgactctatgaaaatgcatattttttttctaattgtggataaaaaaaggagaaagaaaacaaatatcattattaaattcactattctctctccttattttcttcttttatttagtttttaattgtgaagtattatttgcctacagaaaagtacgtaacatattgtgcagctcaatgaattaccagcaatggtccacctgtataattgccacctaggaaaagatagaacattaccagtgacccagcccccatttccttttcctcaatcatttttcactcttcccaaaggtaaccatccatgggatcatcaacactgccattcatgttgcttgcttgtgaacaattattatacagtgtgaattattttacccaacattaggttcataaaacccattaatggtgttgtttataagtgagatttgcttgttttcattgttgtgcaatattttattgtttgtgttcaaaaaaaaactttagatgaatgaaatttaacagagttgaattgagcaaagagccattcaggaattgaggagcccctcaaaccagataggttcagagcaactggggggctgccacaagattagataatatttatggacagaaagaagaaagtgacatacagaaaatggaagtgaagtacagaaacagctggattgattacagctccacatttgccttatttgaacacagtttgaacagttggtcacctatagttggctgaaactctgtgattggtacaagagtaggttacagtctgtttgtacatccagttaggtcacagttcactacgcatgaagaaaccttgaggccaaacttaaaatatgtaaggaggtatccagtctactctcaaagtatgtttgggctgtttccagtttagactattatgacaatgcttctacaaacatttctgtctcttggtatgtacattcatctagtgggtatgtacctaatgggggaaatttctgtattytaagatatgcatacgttagttttcagagatcrtttatcagaatgattgactgaaccaatttgcaatcccaacaacagggtacaagcattctgatagtcccatgtccttgccaacacttgctattgtaaatctttttattttaatcattctggtggctgtggagtggtatttttttattttgtatttccccagtagttaataagattgctaccttttcatatatttattggccattggttatcttcttttatgaaaccacctatccatttttctgattgttgtctcatttattcttatagatttataggagttaatatttattgatgattttttgttaggtatatgtattataaatatcttctactgtggcttgtcttttcactctctttatggtatctttttaactatgaagtattaytgcagtcaaattatcaatcttttcttttgtgttaatgcattttatgctgtgtttaataaatccttttctacccaaacttgtggatatattctcctatatagttttctagaagctttattgtttaccttttatatttatatctataggctgcatggtattaatttctgtgtatagtatgagttaagagacaagtttcattatttttcatacatatatctaattaacctagaactacttaatgaaaagacctccctttctctatagtacatactttagtgccagctgggtataaatcaagtgcctatgtatgcatggacaactttcatttatttatttggtttatccttgtacaactaaccaactgtcttaattactatattaatctatagtcatcaagagccagtttttttcttcttcctgaagagtatcttggcaatttttgtacttttgcaacttcatataaactttacattcagcttcaagcacatttacttgtgcacacacacatacacacaacctgggatttttaattgggaattcactgactgaatctatagatcaatttgaggagaacttatatctttacastattaagtctctcaatcaatgaacatgctatatcttcatttattgaatcttcctttattttactcaaaaatagttttatagtttttcatgtagaggtctctcatatctttaaatgagtttgttcctagttatttgatcatttaatgctattgcaaatgatatgttttttaattctatgttgtcagtgttgctgttatatataaataaaatctttttttgaacactgattctgtaacatagcaagctgataactaatttattaattttagtaatttatcctttgttctcttagattttctacatacatattcatatcatcactaatccgtaacttttgtttcattctttccaattcctaaatacttttttctgattttttttcttggactacagagtctagcacaactccaattcaatgctgaatagaaatgttagcaatttgtgtcctttaagacagtcaaaaatttttattttattagtatgtatgatacttgatatagattttcttaaagtactctttataaaaataatgaacactttttaaagtttccaatttgctggttatttctaggtttgttttggttttgtttttctaagactggatgttgaactttatctgtaccttttcttcatctgccaagatcatataatttttctcttttggtcctaaagtagcgaattacaatgattgatttttgaatgccaaaccaatcttgctktcctataataaaccctatctgtttatttatgcagttctccgtttgctaatttatttaccttttgaatctacaatcatgtgaaagattggcctataattgccttttattggaataactttgtcaggtkttgttatcaaagttgtgctttctttataaaatggattgaatagtgtcttgcttttttctaacttcatgaagaatttgtgtacaattaaaattaattactccctcatatatttggtagattttgttagtaagaccactggccttacattttgtggtgcgtaggttttaattccggatttgaaatctttgatagttacamaaccattcaaattttctatttctttggggaggaacttttttaggaacttgtccatatcatcttaattttcaaatttattggcataaatttgtacataagttatccttctattatctgtaacatctgtaacaatgtacttttaaaattcctgttacatttttgtgtcttcacttattttccttgtaagtttcaacagcttattttggtctttttaaagaaccaaacttctgtcagatcaaccttttaattgcatttcttatctattttgttaatttttgctcttaattattttcttccttgtacttgttcacatttaacttgctgatttttttcaacttctttaaattgatgagtaactcagamtacttttcttatacattgcaggctatcagtttccttcaatacaatttagctgcatcccatctactttcaaaacttgtgaaattttgatatggagtatttttattatcatcctattcaaagtacttttcatttctctggtgattttctttgacccatgacttcatttatgctcatttggggattttcttgttgtctcagtcccaccctcatttggcaagccctggaccccagttttattaccacctaaccattgaatactyttaaagtgttcctcagtttgttagtttcttagctttctttttttaaattggtatatgcccctcagggaaaaccatttccaaatatgaagctatctttctgggttattttcttctccaggactctgggcctataaatttttactgcctctttagctctgaaaacacattatgtattcaatttttctagttgttgtcagtgggaggattgttctgaatggcttcatccaccaaccattaccaaccattaccaaaattggaagtcaagattcccattacttttaatatttgattcctaaatgtaattatcaaataacattttatttgcattctacaagaatatttgagttccttgagttgcaatttttataacaaagattaaaaaactcaagtatgcttttatgtgggtgataacaactctaatcaaggctaaaactttaatagaaatgaatgcccaattagcattttcattcataaatttattgttctaattttgttatacatattaacatcttttagtctttggctatcatcttgttcacattttattattattttttcaattagctattttgaccagaaaatcctcatatggatgtaaaaataaatattttattttgcttttacctttcaaaagctgggyaaataattattttgcttttaagaagaaggtatctaaaatgcattgtaacttattttgaaaaatgggttccagatatcagaggttagcctgttctgaatataatacatcaggggaatagcttagaatataaccaaagggtgtacttaccccacgtataaaatttagacatattacgtagtgggaactcgtggttgtaattaaaatatgcctgatattatagtaaatcgaatcctgttaagtcattcacgtattgatagaactacatgaawgtagtattgtatctctttatttccaccgtgagtataaaactaacttcttttagaaggcctattaatagttcacatatagcatgtattagtctaataatattgccataaaaaataacacagactcggtggcttaacaatggaaatttatttcctcaaaggtctagaggctggaagtccaagatcaaggtgtcagccagtttggtgcctcctgaggcctctccccttggcttgcagatggtcaccttcttgctgtgtcctcacatggcctttcttccatgcatgtgcatccctggtgtctcttccttttctgataaggacaccagtcatatcggattagaatccatgcttacaatctcactwtaccttgattacttagttaaaggtcctatctccaaataacaatcacattgtgggttagaatttcaggacatgaatttgagagagaaataatttagtccataacacagcacatattcattcaaaaaaacattacccacttaatatgggacaaggactgttcctatatcaaaaattataaaggacggaaataaacaaaaatgtttaaagcctaatacattgttatttttaaaaagataaaggaattggcagtatagggttgtggggagttattttagatagagtggtgataaaagattgttataaaaagatatcctctgagcagaaacctgaaaaaattgaaggaagacggaatttatgaattatagaggagaaaattttaggcataaccatttgcaaatgcaagggccctgggacatatatcggcatggctctatagaggaaatttcaagaaagccattgagagaatggtaagaaataaagtcagacaattgacctaagatcagtatacatagagycttgtaaaccttggtagagatttttattttattttttaaagagtcctgggaagccactggaagctttgataggggaatcccattgatctgattttcgtttataaaggcaccatggtaatagacttaggagaggtactctctagaatgtaagtaaatggggaaaccacataagtagttcagtagtagagtcaaagatgtcatctttgaattgggtgtcagcagtagacaggatgagatgaggtaggatttgggatgtaatttgaatgtaatggtgacaggacttgctattgaagaagatgtttgaaaattcctatttttggtctaagaaataaagtaaatagtggtgctattccctgacatggtgtggactggcttgaaggagagttaatttgggagtaaaataaaatgagttctgttttagatgtcataagttagagatgcatattgaattgcaagtgagaatcatgtaggcttttatctatakctctctakaaagagtcaaggtagggggctagaaatgtaaattctaktgttatcaaagtatactgtagatcatagtcaaagtcaggggactcgttgatattgtccatggtgagactatggacagagaamagaagcagtctaaggactgagcccaagaacactccaacatttaaaagatggagaagaggattctgcaacaagattgtaagagtaggaagtcaattaaaagtagaacaaagcaagtatgtgatgctgaagccaacactaatatgtgtgatcccatgatcattaacaagctatgtttctagagaatataacaaaaaataatcctttcaatattatttatttaactggaaatctgaaaatttgtattaaatataggcatagcaatattaatgtcacctaactaatgaataatcaagcccttggaaagaaagcatatacctgtgattataataaaaggtaattaattatagggttgaacaggaagggggaagaactatcatttaaacatgttatactaaatatttatcatgcttcttttggctgsgtctttcataatctcataaaagagaattaaatatggagtgatgaaaatatagagatctatgttgatgttaagcagaaaaaattctcactacttgcaagttaatttggtgttgaatatagatgacttcagatcctcaataaatactagttgatgttctttttatctctttgcttctttctacaggcggggaagtcccgtacacgactctggctacccgaatgatgatgggggcttggtggctatttgctttgattgttatctcatcttacacggcaaacctcgctgctttcctcactattacacgcattgaaagttccatccagtaagtaaacaatgtttccattagccacaaaatatgagaaatgataagagtggccaaagctatctgagaataagtatgtggtgtctcataataaatgtacaacttctctttgagtaaaggatcaattttgtgttactgcaaagtatcactgattagtccaagtcctggaaatgcagtattggtagagcattttttataaagtaaaaatttggctatgatttcaatgttgcttcccacattttcctggaaggataacacatcttcagaattttagtgtccacaaagaatgactatatctgactaacactgtgaaaaggaagaaaaaaaagagtcatacttaaaaggaaatctttgccttgagtctgtcccattatgtactgtcagaataaatagttgaatakatacasatgtttgagagatagacggatgattggggattggggagaaaagaaaagggaggggaatagcaatcaacagaaaattatagtatttcagtaaccacattctgtttttctcttcattaccttatacttcatgtggtccttattgctgctatttactggttgcagttggaatgctgggaaatagtgattaactatggtgcacttatttaatcctaaaagttacctaagccagtgtctcaattcacaaatgccatttccgtaagcccgtggagcccaagggccttttatccaccacagccagttttgcttttgtggtttcatgctataagatcaacaccacagtataatttctgccttattagaacataatgttctatatattgttttaagaaaaattttcctgaaaatgttttattcatccccaaacaaggtaagtttgaattttcctaaagttggacattcatttcccaaaaagctgacaattcaaattcagaataattagatatgtcagggaattccttaggaatgtaacttgtttggaaaagaaaatctgggtagttattttcttttaaaaagaatgtaaattaaattcattagtagccacaaaactattatagcataataccaaaaaagttaagaattaattatctataaataaatagggtattattttctatttgctcattatacaaattgaaactcccatattcaactagtaatgctaataagtagtcaattattttatccattcataaaawtgatgtttctagtttctctcatgaaatcatgctgctcaagttgttttccaattattcctttgatacagaaccttcatattcccccaatttattgtccatgtaaatagatctatgtgtgacataaattacaaatcatacagagtgaaacttataccattgatggaaagcttatactggtgaccccataagcatcatactttaagcaatatgaaaatgattacaacagcccagccaaaagatcaatgaaatgagtaaaattatgaaaataataataaacatttattgatcacttacaaaaagccagattttgtgatgcattagcttatttaaaacttactatcatcttcaaaaatacatactatgaataactcattttataaatgacaaaactaaagttgagaggataagtaactcacccaaagcctgcagctagtaagtgactgagtaaagaccaaatcttaaatctggttcctgagcctacattctaactgcatcatgttagttcccacaccacacttgaacttgaatttctgtrtgaatcttaggttttagagaacacaagaagaaactcgtcatagcattttccattgttaagggatgtaaaggatgaaattctccaaatcctcaactggtctgaggaaatagagtatcaaaagttaggtgacttttgtgttataggcatgtaggcatatatcccaacatgagttaattatgtctataattggtatctaccattcagggtaagactttggcaaatccaatcaatagaagtcattttaagaaaaatagcttaattgtcaaataaaaattgtacatatttaagttatacaatgtgatgattcaatatacatatacattgtgaaataattgacacaatcaaatgcaccacccatgctgtgcattagattcccacaactggttcatcttctgaaagttcgtaccctttgaccgacatctccacattttccctatactctagcccctggcaaccaccattctactcctgcttctacgagtttgacttttctagattctacatataagtgatatcatataatatttgtctttctgtgtttggcttatttcacctagtgtaatatcctccaagttcatccatgttgttgcaaatggcaaatagcaaaacagtttttaatcaataaaattgagtattttatttcattaacatatttcttatcaattatgttgaatgtgtcacattttgggtatccttaaagctcaaaatttatgtagttcacatctgactttgaagtgtttttaaataaataaatcgtaaaaagtttaaataaaataactgatcctatgcagtaaacaacaactgtcattatagtaaacaaaaaatcatggttaacattgactgagaatttataatgaaccagaagttaagcatattacaaatatcatctcatttattccacaaaataaccttaataatacaagtactcttcttattgccattttatggatgaagaaacagagtttggaagataatgcttaagattacacactcaataagtgtcagagttgagagtccaatccatgtcaatcagacaccaatccgtggccttacctgtcaaattcttttttttttcttttttttaatctagtggtgggtcctagaatttgtttgcttgatatggtatttctctgaggttgcagactttgtggtgtctgtaaatctgagttatttagttattactaactttgccagcaccagtttttatctagactttcatgcaatagcagtgggaggagaagcctgtctcaaatttttcatccataggtttatctaaaagtaaaacctgatggaaaaagattgtaatttcacatcatgtttccctcaagtgtagttctactgcccaaagtaactttgcattcatttttttaaaaaatcattcctttccartgccaactggcattattaaaagtcatcagtgggtataataaatctctacttccttgtaatattatcactggactaattttggaatgagagaatcagagccaaataagttaaaagaagccagattccctcccgaaatttaaagatatcttctaatttcatgcctcaacagtgttggtaaacataattgcctgcagtgtttcttagaaacattcaaaatctcatttgtaactaatgccaaagtttcttgggaaaattctaatttttcttagaaaagacaaactttttttcaaagtagcattcaatgtcatgcttcttaatcatttatattaataagatttgctcatcaccaaatgaagctgcagtgcatgtcaatgtactatttccagcccaattttgctgtgccattggcaaacacatgccaaccatagcttcatttccaaaattcagcgttgcttctgcagactacaatgggcagaggtggttagaggaatgtcagtgarggggagagagagagagagggagagaaatcagcttctttgaattgatggttgacagaaactcttccactttgctgggagcaatctaatagatttattttggggaagctgaataatttcataaaattttaccttgtttttaaaattagatatctatgggcatctaatctaactggcacttgttattaataaaagttttgaaagggaattttccctggaaaagataacccataaatttaatttcatatcccttcagtgatatgggcagcacatcataactatgtcctatgtttaatataatataatgagacagagtatgacacagttcagttcttaaagggaaaaaaaatgccatttccacaagactctaatgacaatttgggctttttcattcccattgagaggtaacaacatatagttaattgttttcaaacacctagaaattggaatgattttttttctcttgataactagactaatagtggcaatggtgaaatggagcatgtgaagctttgaaggtacttcagagtaagcactggataatagcatcatcaacattagttctgtttgcctttattgtgatattacttccaaaagctacctagttcacataaaagtgaaaatagctatgggaaaatcagggttacacagttatagttattaataactttagaatcaaactggtctttggtgatgaaacttgagttttttcattcccaggagctgcaagtaaacttggacctactcaaagggatcccaacatcccaccatatttttgtgttcagtgctttcattctccataatgcttaaggttggactaaacaaaatattgagttaattctgccactgaatctaactaatatgggatagcattgctttccaaactgatacagaaagagatccataaatattctattactaaagaagaaccccttttccctagcatatcaataacaggatttttgccatcaccttggtctacattttgaaaagaaaataattattgagcaatttttttctaagtgttcacaggtgagtatgatctaattatgcttagaaattcaagcatcaccaaatctggtactaaagcctggagacagagggaaggatagcaagtgacagatgctctgtaaagaaaaggaaagtgggactaaatcatcgagggcatggtaagacttgttaaggaatttggaatttttcctggaggtaatggagagtgacgttgtagaaagacaactttatctctggagaggaggacatgtgggagagagaaaatgtaggcatgcatgggaggccgttaaaggtgtctaatgcatgtatatttacagcaattaactagtatgtctctacttgatacgaatatgtctctacttttttcaagggctacttaatttgataatactagaggattaagggtaacttagaaatttggcttcagaaacttcatatttctaggctaatatttacttatgtagtggatgtaagaatattgcctcagttaattttgtttaagatatttaaagagaggatgtggcttactatgttttagctaactaagtaaaaaggaagacagtgattaatgaggaaattctggaaatgactctgtttaggctgcgtttcacatgcaattttgcagaaaagttgcatctcaaggtctactattcgtgggccccatctgcctctcacttttagctttgagccatcaacaaagaagttagacttattyttattccrtttgaatgcatttttttcctgattgtaaaaaaaaaaaaaaacaggctgttttgagaaaataggaaagtacaaaaagatgtcgaaggacaaagcattaataatccataaactgtcatggggcagtaagttctgttaatatttggacaaactttcttataacttttaattttgcaattattatatatacacaggaagtttcaaagatatagtacagagcagtgtcatgtattcttctctcagttccctgaatttttgcatattaagtgattatactacaaaattaaaaccaggaaattgacattggtacaatgtgtgcaaattgctctatgacatattattacatatgtagactcctataatcaccactgcaatcaagatacagaactattccatcacggcaaagatctctctcattctacccctttatagtcacattcacccttccttaccaaccccaacctctggtaacttactgtgttccccatttctgtaagttttgcgtttcaagagtgtaatataggattgaatcagagtatgtggcctttcgaaaatggctttcttattgattcagcataatatccttgagatctatccaagttgttgtatgtaatagttcattgctttttattgctaagtaataatccatggtatggatgtaccacagttggtttagcaatttacttactgaatgacatttttattgtttcaagttttgggctattacatataaagcttctaagaacacttacatggcagttttctgtggattttttgtttgtttgtttctctggcataaatgcccaggaatacaattgctcggtcatgtgttaagtatatatttggtttttaagaaactgccctactaatttccagagtggctgtaccattttgtgtttccacctgcattgtatgagagatcaagggtgtctgcatctgtgtcagcatttggtggtatcatttttttttttttagccttgctgataggtatgtggkgatgtctcattgtggttttaatttctattttattattgtgtagtggtattgaacatctgttcatgggctcatttgtaatccttatcctcttccatgaaaggtgttttcatgctttttgcctattttctaattgggttgtttactattaagagttcttcacatagtccagacacaaaggctttgtcatataggtggtttgcaaatattttctcctagtctgtagcttgtattttcatcctctttatagggttcatcatagaacaaaagttttagaagttgatgaagtgcaatgtatcaattttttcattttatggattgtgcttttggtttcatgtctagcactcttcaataagtccaaggtcatgaagattttctcctatttcttctaaaagttttatagttttacattacacatttacatatttgatgcattttgagttaattttgtataaagtgcaacgtttaggttcaatttttcactatggatattcaaatgctcaagcagcattgctgaaaagactatcctttcttcattgaattgttttgcacctttgtacaaaaaaaaaaatctgttggccatactatgtgagtctgtttctgtgttcctaccctgtttcattaatctgtgttgtctatccctctgccggtaacacagttttgattactgtagtttgagtagagtgattcttcccacctattttttcagaatcattttagctattttagttcctttgtctttttattataaattatagaataatcttgtctatatctacaaaaatattgctgaaatattgacagtaattgcattaaataarttggagtgagaattcacatttttaatatgatgagtcttctgatctgtaaacatatgtctccccacttatttagatctttgatttattttatcagcactttataattttcattatacaagtcctgtacatgttttgttagatttgtgcctaagtatttctttttctcagtgattacaaacgttcttggtatctcgatccatttgtgctgctataacaaaatacctaggtctgagtaatttataaagaatagaaatttatttcctcacagttctggatgctgggaagtccaatatcaaggtgccagcaggttgagagtctggtgagggcyaggtttctgcttccaagatggtactttgactgctgttctatgtcctcacatgacagaaaagatggaaggtcaaaaggggccaaactcattccatcaagcttttttataaggaactaatcccagccatgagagcagagcctttatggcctgattgtctcctaaaggtccccctcttaatattgttgaactagggattaaatttcaatatgaactctggaaggaacccaagtattaaaatcatagtaattgaatttttaattttaattttcacatattcattactaggatatagaaatacaattgttttttgtctgctgattttatcttgtaatcttgctaagctcatatcttacttctaggggtttttggtagatcctttcggatttcctaggtataatttgtaaacttactaagctcctttattagttttaggagtttttggtagattctttggatttttctaggtatagcttatgccatttacaaagtcaggtggttgtatcatttttctttctcatccagataccttttattttctattttgccttttctttgctggatagaatttacaatactatgtcaaattaagagtagtgagagtgaatatctctgctttgttcctgatcttgctggaaaagcagtctttgaccgttaggtatgacattatctgtaaagttttttattgtagatattatttctcaaattgaggaagttatcttctattcctagttttccatgtgtttttcgtcatgaataggtgttggattttgacaaatgatttcattttttattgattggtatgctcgggtaatttttctttattagcctgtttagtggattacatcattcatttcaacaactatttttaaaacaaggtagaggctaactatattccccgcttctatttcttctccatctttttctccaagtcttgattttctacttgattttcttcccattattgattcgagtcaataaaatatcatgactgtccctgcctgctgcttcacatcttagtttcttttcccttaccttaactattgttcctctttctccattctcttcccaatagagtttatccactggagtgtggagtccagactgttaccttctcccatcctcaaaattggcttgaaaaactttattattacttcatccaataaagatgaatacaactccattagcaaagcatattgagcccttctttcccacccacatttctgtccaggggcaccaacaaattccttctcactttttcatgctacagtcaagctagactcttatgggaccttgcatgcctctctggagctttacatgctcttctctctccctgaaatcactcaaaacccccttctcttccggtatcttccattttcccaggcagaattagccattactacacatgtgccttctctttgcgattttaagttcttcaaaagcaaagactatgttatatccatcttgagaggcactgctagagtgcctctcagagtacctaacaatagtatgaataagagcagctaatatttcttgagtgcttgctatgtgacagctagttttctaaatactttgcatgggttttctcatttagtcttcgtaatagccccatgagagatatgttattatcatctctattttatagatgatgaaactgaagctagggtagtaaacccaggcaatctagcactataactttttaccaggggaacrtattgtatgctaattacaaatacgctaaacctttattgtatgaaataaataaatgaataaatggcatccataagggttactataaatttcttaggaaataaagagagctttgcagaaaagaataaatggcagcagtatgtttagctaagttacttccaggtatttctaagttatgtggtatgcaagtcagtaacgggagactggattcaaacaaatctgcattcgaattctttgccacttaatagctcaatgaccttgtcaggattccataattattataaaccatattttcctaagagtaaaaaagggatagattcaacttcataggtttagtgtagtgtttagtgtaaagattaagtgaaaaagagcatgaataatataacacagtccatggacagcacctacctaacatttgcttccattcttctacattttctctaggcactcatatagattccttggcctgtctttctctctgcccccattttgatggtatttttgtcattttgtccacaattctatatattaattgttcctttgagctgattcacctaaatctcaatgtttcttgcttatggagctactgtttctgacacagatgtcaccatcctaccttacagtctatcttgctgagggttgtctttttgccctgctgcttaatcctctcattttccccaaagataaaagcaaaataaacaaacaaaaatctgatgcatctgcaagccttatctgaatttaggcataaataaggtcttggaagaatgattcactctgttatctcaccttagmtagtgactaactagcactgagatcaggktgctactaatagagactggcaagacccctgggtcaggatatatatttgccaggtaagttttctctcctaactcacctttatttagccctctcataatacacagctcaaatactcaaatatgtccttgccacatattcataactatatttagtgtctcccttttttgaaccacttcacatctacctcacttacaccctgtattggaatactattctacttgttttacttccctattaaaatgcatattcttgagggttgttttatcatctttgtaccagttcagtgccttatgtagtgtattgtgtgagtacttagtgggttacaagtaaatattcactcactgagtgaactagaaagacattttttagaatctgacctgagagtgtgaaactccatgacttgtatgtgtaccccatttaaaaaattagatagaaatatgaaagccatttctttgtcctattattccaggataagagaggaaacccaaaatggtatgctctctaagtatcctttgtgtcacccactcactcttcagtcttccagtaggagtcttttttatagctctcagtagggaattgcacactttattaggaggagccaaaatgaaggtggatgaagtgagcgagggctggctcatactgcctttctgtttcattttagtacagaattgtataggcttaactccagaacacacaagcactgcagcagaggaagacattcatctccttactctctattgttagtgttgaaatggcttacttgtcctagcacttaagtactacagtgatggatgtttcccaaacgtacagctatctcgatgtcatagacagaattttgtctctgttttggaaaaaaattaaaacttcctagaagtatattggtctttcaaagccacctttcagtgagcatttaattaaaagttgtctcacagtttgtggctcccaggaacagggctatgttagcatttccatagactctgtttacactgagctcaccaggacaaaaactttaccaattttataatcttccacagcttctaaaataatcttcttctgaacaagatgaatcattctagacaaatcaaatccttctctttttctctttcttcccaatcttgctcctttaagcctagaaacctattaagtgctgtgctcaagaatataaattcctgtctcttctccattttctgttacttcctccccttactgaagtctgctggataaataaattctatccaccacaaacttatagatatggttaaaaaaagaacctatgcttggagtatactgcttagtcattgtggaggacatagtttgagtacagagcatccttttgtgaaattaatgtgggaagagtagtgatgaaaatcagcaagactggagttggcagccggggctgtttggcagaagaatactattaaaggagactgaagacttaggttcaagtctcttttctcctactaaagaataaggcaaattctaaaactactttgcacttcagtttttcgtcttttaaaaaagtgatccaattcttcgctcactgcacaaatatttgctccacagtttgaatgatgttattttccatgtcccttcaggcataaacttttatatcaactataccaatgagatatcttaataaacaaggtgtgagataaaactgatactcaactgaaaacctgaataacagatatcttaagttgaaaggcaaatctgaaaaaaaaaatccttttttgtcatatcttcttattttctttttctagttctctatttccagtcctatttttctttccctagcctctccatcatgccagtgatgttggtatgctgccctccacactctactgctaagtatctgtttgaccccatcaattctctgatgctcttagttcctccatagttcctgtcacctaaagatatttaatttattttaatggctctctcctccactccccccccmcacacacacacgcacaccacacacacacacacacacacacgtactacagcctccatttctcaagcccagatgctaaagagggatgatgctaaataagagccagataccccagctaatagcaagtggtgaggaaggcgaggaataaggtctaaagctggctggtgggctgcttttattcagaggacgattgtcattttctgagagggatgctacagagttctcaagatttgctgttgtcttgggagtgtggagcacatttgcaaaacagttcgggcatttataatctcaaaatagcagttaataagacctggctctcaggcatcaagatatgcatttaatatcaacttctgctgaaatttctcaaaaaggaaataccacctacttgagaatagaggataatttctctgaatcattctgaatcagtcattgtggaggacgtagtttgagtatggagcatccttctgtgaaattaatgtgggaagagtagtgatgaaaatcagcaagactggagttggcaggcagagctgtttggcagaagaatattattaaaggagactgaagacttaggttcaagtctcttttctcctactaaaaaataaggcaaattctttttattttattattatactttaagttttagggtacatgtgcacaacgtgcaggtttgttacatatgtatacatgtgccatgttggtgtgctgcacccattaactcatcatttagcattaggtatgtcacctaatgctatccctctcccctccccccaccccacaacagtcctcggtgtgtgatgttccccttcctgtgtccatgtgttctcattgttcaattcccacctatgagtgagaacatgcggtgttcggttttttgtccttgcaatagtttgctgagaaggatggtttccagcttcacccatgtccctacaaaggacatgaactcaaaccactttgcacttcagtttttcgtcttttaaaaaagtgatccaattcttcgctcactgcacaaatatttgttccacagtttgaatgatgttattttccatgtcccttcaggcataaacttttatatcaactataccaatgagatatcttaataaacaaggtgtgagataaatttaaaaaaaatatttattttgagaaattcacagacctactggactgagaagaggaatgtatcttttgcatttggaaaatgttgagttatcagtagaaacttggccccctgttcctgtgttataaagagccaggatttttggtttttgtcatattcattagatacttcactgaaactgtgaccttctaccttactttgacagtaatgtttcactgggtctttaaataggctactaaattagcctacacttattcatggtaacttatttctcctagtcttttatttcccactatgaaatttttgatagtatgattaatgtttttgagctcctcaaaagatcttatagaggaaaaaaatcacaaattattatggattcctcatttgaattcacactgtatttcatttgggtcattgtttcatgtagtattattatgtattattgtttcagagcttgttagtaggccatatgcaaggtagtgatcaataatatttcaatgtcagccttggagggtatattgaataatttttttccataagtcagcattggtcttgattctaattaacattttcaatgttaatttgaagtatggaatagggagtaagcttattaaatatgcagattactctatattgagtaggggtgattattgactagaactccactgtaagaatgtataaggacctttacaaataaaacaaggtgattagaagtacgatgaagtttaatagggacgaatatgtgataatcactcagagatggaaaaaacaaactgtatgcgtatatttgtgtatacctatgataatttcagtataaaccatctgtcaattataaatctgaaatgtggcattagtgtttatttttaaaatgaccagagtaacctagcagcatgtaagttgttcaagccttgtaaagactaccatgacctacttagaaggttcacaaattatgcaaaaactaaaatacaagagaaaaaaaaatggtttagttaataacagtctaaaaatggaagtaatatatcttatagataacaactaaaataatttagtatttaatttgacaaagagaaggctaaaggaggaaaatgaaaaagaagtgttttattacatagagaaatattgtaccasaggtggtatgcaggtattgtccattttcattgagaacaaaatagtgttttctgtgaaacaggagattttggggctatgtacaagtaaggactcccttgtgttaagttttccaagtcactgaagtatcttattwaaaaaaacatgaagtcagttttagggactggtttatgtgccttaaggtacctaatcatattatgtaatgcctctggtaactctttcaactctctggtattatgattattttagtatgtttttgttaacaccatttaaaaatgtgatccttccagggaaattaacgggaattagtgaagtccttcctgaattttcaagaatataggaatatgaaaatcccctatttcactactgaaatctattgcattatttgaagatatcatcttaacataaattttacaatcatcctataatcagcggtaacattgtaaaatgctgaccataaaatttaggataattttgtatttcttcctagtgtcttgagataaataagtattgcagcttttttatgatatataaaaaagaaactgcacatgctttttaccatgcacaggaaaactgcaggataattgaatgtacagaatactaggaccttttatagtgaagatttgcttaataatttatatattataatatatattttattagatatcatacacatatattaaatataatatatctaaaatggcctttcatggtatatacatgtatatttattttataatgtatttattattaaatattaatatayaccaaatatttgtttatttaactaatagccatttaaaatagagaaaaggatcataaatgatatttctgtcaayactgtcagagttttgaggtttgtggtagaaaaatacagtgtctgccacatttcagggttcatgatgtgacacaattagtttctagcttgtaatgtgggtcaataagtcagacaagccagtcagattttcagatgactgttctcttgcatctgtataacaccatcatttcacagagagtttaacaatcatttttattggttatagccaacagcagtaagacgtgcagcatttccatcttcccttagattctctaaaatggcctgccgtgtccacatatctgaactaactcctaagtttgtaaggaaagtgcagatctttttaatgcaaggggatgttcccctaagtagtccatgacatctacccttcccaagggcatctactttacataaacttacaattttacctgtgaccatctgactgtaccacatggtgggtagggctgacccagaatactttcgtcgggasagagtgcagaaaatattcccaagtctgtcagggtagacttcagggtcatctgctggtctgtaatccccacactttgtaatctaatctaccacaggaggaccgtgttctgccaggtagatgtgcccttctcatgaatcttgctgcgcactttttctagaccaaacgcatcttatattctggtggctatttaaacagttctaaaaaaattaaaatgaaatagacactctaaaggagttcaaaccagaaggacctgaggctgtcttttatctaatgtattctgttgtgccacatgaggagagttagggggaagatgaaagactcaggacaggagtggggaaagggacagaatggagcgactagaaaaggctgcatcatttagaccttattcaagcattccacatggaggtgcccatcttctgaccctccgtaaatctctaaccctctttgttcctcctatggcaccctctccatccagaaggcttcatttgaaaagttctctccatttcccaaaatggagtcctaaccctctgccttgcctggtatcattctaccgtgctggcctcagacctcagcttgctcttccaaaggcttctgctgtgttgaggaggaagagactctggcaccataacaggaaggaagacacagcactttggtgctggtacattccttcattagagattgctgtctctgggttcctcctgaatyaccccacaccgtgaggaatacttttaggctatacaatctaatcttctctgagagaaccmtatgtcttccattaacatgactttgacattaatcttttttaaaataggaaacttagtgctattaagctaaaaactctttcctgagcctactttcattaaataaggacaccccttcaggcactaaaaatatcttttacagagctcttaattatggaccaagccaccttgaaaacatcaggagtcctttttatcccaccgtatactcttgatacctttacatttcaccagactttacaagcttgagtctgaggtagttaagaaaacttcactaaggaaaaggagctactaagtaagataggaatgtgacttctcaaagaacaagtggccattggctacgccgtaaataggaaggtggaaggcttattccatttgtccatacatagagcgtacatactctccttcctcctcattatctaaatattcaaccaagaaaaacaatcctgaaatttaattttctgtagtaatcctcaacattgccaaagrtgactgtcctcgacttgttctgctgcttatctcaagattctttagctactaaaatcatgaattcttttacatatttataagcatttcaattaagcaattttcttcaccatttcagtttgcttccaatatttcagtgaaaaaatcactcagttcatgtaccccttatcttctctgtctgcactgctcagataagtaactttttcaagagcaaatattctactttgtaccaggtcctatgtctaccagaatcacagactataccctcagctttttgaaatacgttttttggtcctaattgtttgtgttttctttttatttgccttgcctctgaatttatttattttacatatgtggcaaaatattatgacaggcaattcactggaggttcaatgaagcttgcccagctgattgtgttacagaggaaattgccaaatatttctttaaaaatgaacaatgagaacacatggacacaggaaggggaacatcacacaccggagactgctgtggggtgggggaattgggagggatagcattaggagatatacctaatgctaaatgacgagttaatgggtgcagcacaccagcatggcacatgtatacatatgtaacaaacctgcacgttgtgcacatgtaccctaaaacttaaagtataatataataaaataaaaaagttttagattttttattktgtttttgatttttttttttttttgacggagtcttggtctgtagcccaggctggggtgcagtggtgtgatatcggctcactgcaacctctgcctccgggttcaagcgattctcctgcctcagcctcccgagtagttgggactgcaggcacccaccaccatgctcagctaagtttttgtattttagtagagacagggtttcaccatgttggccaggatactctccatctccttacctcatgatctgcccgccttggcctcccaaagggctgggattacaggcatgagccaccatgcctggccttgtttttgattttttaactacaaatacttctggtcatgattagtcagctgtagaatggctaataatatatagttaaaatgctattattatgccatgctagtttcaggggaatgcttacttcccaaaatgaaatatccttctagtgaagaagaccaccataaaacaagtaagcctcattgattgctgactgttttccagaccctgggctagatctggatttcaaagatgaagttttttaaaaatcatgggaaccagcaatmtatattctagtgaggtaaataaacaaatacaattcctaaacacaatgctgaaatgtgaacatattccaagtgttagaagagcactgaagagacagtgaagtttcatgttgaaaggaaggaattctccaggtagacagagaagcatcttatgccaagaagacatctaccaagacatgcacctgtgatacagccaggaatgaagaaacagtgtttggcttatactgtgaatatgagtaaggcaaaaggttgtttctgagaatggaaatagaaaaggcttaagccaaatttttgaaggaacttgaaggctaaggagtttaaactgttttctaagggcagtgaagtacataggcagtacttaaacaaggcagcagtatgatcagattgcatatcagaaagaacagtttagctgtgctaaagaatggattagtggtgagtgagaacagagatagggaaaggcttaaaaataatagtccaggtagaaataacaaggctattagacgtggaaaggcaaagatggtgacagatttacaraatttaggaggtaaaatatacagaacttgatgagagtagatgaggtggggaagttaaagatccacaggtaaggaaggggattagctgagaatgaatctaattgataggaaacaaggatacggcaattccagaaatcataatagagaacaaagtaatagtaatcatcataataacatcaataattttaactactggtaattgagtgctcatagctaattactaagaaaagtgtcttataaacaatatctaattcaaacctctagataccttaatataaaagtattagttcctctgctcaatagagaaagaaattgcattttggagaagtttaaataattttcccaaagattgaaacacaaatatttatgttttcacaattcatgcttttagaaactaagtgtttgctcagtgctggtcagttggcagtacctcttggggatggcctgccttacccaagcaccccagtccattttgtaacactttgacttgcttcttgggtctaaacaacattaattctcaccctcacrgcatattagttgttcctttaaatgctacattttggatcactttttatgctggaaaacttgtcaccgcacttcataggacagctctcagctgctacaaccaatggacaggcaggctgtttacatggttgctaatgagctctcagggctgtaacaatatctgtcctttgacagttgctgaaatcagcatccaaaggagaaaactgagaagagaataggggggaacctaaactgagttggaggatgcttgtcatatacccctatttgtctcttttccactgttagcccttttgcctgaagcatctggtgcctatcctatcagccacgttccatttttctccccctgaagaaaaatctcctctgatgtgataacttaagttgacttgttccaccccatagaaaatgggattagacttaaaattccccaaagccagctgtcaggccactcttgtcagttattgatgagcrttctacacaaccaggctaaatgtagtttttaatcttagaagacaaagaagatggagatgggacagagaggtttatgagagttatttaagttttatgtggatagtgacatctactctcttgttaaaggaagataggaaaaaaatataagtgaaagtttaccacagaggggttacgcattagattttttaaaaaaatagttgacagttttagagatgtgtttttaacaacgtatttaatataacattatttcattaatataaaattgtataaatgtcccagagagtttgctatgaagaaatttatgaccatttagtatcatagagtcacacaatctcatacttggaagggaaatcatgcattatttattctatttcagtgcatgaattcttcttcaacaatatttataaagaatcacctgactctgccaggggggaaaaattccacaaaaaaataccaatagaaattattaaataaggcattgtggaaggaggaatcatcaacatcataatctttatataaaaacagtagaaacctgatcaaatactgatttgacagatatgcttgactttaaaatctaacctactcaatgttaaagctattgctgtcagatatatctaatagactatcraatatttaaaaaatttaattgtattatttttattttttattttcctttgagagggagtctcgctctgttgccaaaactggagtgcggtggcacagtctcagctcactgcaacctccgccttctgggttcaagtgattcccctgcctcagccttgtgagtagctgggattacaggtgtgtaccagcacgcccagctaagttttgtatttttagtagagacagggtttcaccatgttggccaggctggtctcaatatcctgacctcaagtgatctgcccacctcagcctcccaaagtgctgggattacagacatgagccactgcgcctggccccaaattaattttaaatgcttgaaaagagtttcagtgtttattgaaagaattttacagaaacctaaagccactcaaattttaaaaatttattttcacagaattgccttaaatcacacagtacctcagtgtatgtactgttcatacaaataactaaatataacttactcgtaagctctcagtattgttcagtacccacaggttgatgctagtctgatcagagaacagtagcaggaataaaaaaataatctcagtcaggtgtcaagaagataaggctgattagagcagcaaagcattttctttcttttatcatccaccacttagagctatagacactcatttttttactgtgtgcatgagtaagactgtgggtttgagagaagagacctcaggtctaatgggttctcagagtgagcattcactgagttttatgtgagatatgtggttaggtagagaaacagagtatactatgagttatacatactaatactatgttcacagataacacttctctggagtactctagatttttccattccttcttctttttttttttttttcttttctgagaatgagttttgctcttgtcgcccaggctagagtgcaatggtgcaatctcagctcactgcaacctccatctctcgggttcaagcaattctacctcagcctcctgagtatctgggattacaggtgcatgccaccacatccagctaattttttttttgtctttttaatagagacagggttttgccatgttggccaggctggtctcgaactcctgacctcaagtgatccacccaccttggcctcccaaagtgctgggattacaggcatgagccaccatgcctggctgattttcccattcctcctatcatctgagaaaatgtctattgttaaaaaagaaatgtctgtatttgacatggtatattaatgtatatattagatgcctattaatgattctatgattgttttacattttaaaacaatgattaggcatgtctaaatattatacactcagattttgaccttcagatacaagtttttgaagattaccatttgttgaatgacctactatatttcctttaaaggctcataatataggctacagcatttctgctaatcttgttctaaactcttcttagtatgaaaaatacaaagtgaccgcttgtaatagttactccctttctattttgggctcctgaaatggccttttcatttggtaataagctatttgtgttcacttcattttgcttcagtcgttttatttttgtcatctttggtgctatcttagtgtgctatgatggaacatgctgaatcagaaaacctgtaatttttattgcaaacatgtctcaaggcaaatttataagttgcagttgatatcagaaactactagagggaacatgcctttgttctaaattacaaaatgctctgctattctaaacttgaagtatgttgaatataaactgccttttttgtaacaccaggagcttcacatgggcaatatattaagatattcctctaaaaatgcattgtgtacaaaacaacttctccagctaaactgtattaaaactctatattttcaggctgtaaagctaatatttaaggtgaagctatgtcacagaaacctgatcatattaaagatcttaacatttgatttcagttttcttttcatagaaggataagaaggagcactaatttatttagcagcatttagccagggtgactatttgggcaacccatttatatatttaaatgaaggcactgaaaaaaaaactgcactaaactgtgatctcacctccattagattaaaaccttctgatcattatagttgagtttgattgttagtactgccagacagccaagggcccaatcttgtactggtagggtgtctggtgacctgcaatatgggctttctccaactatagacctgcaggttctagatgatgctgtgtacaaccatctggtcttcacctttgtatttatagaaactgaacaaacgagtattgttgttataacctgtgtagatatattccattccttcttcctgtgttaccacttttgggtatcctccactaaacagggggatatatgtttaaaatgttcatgtttataatacagttttactgatactactgaaaacagcagtaaattgctctcttgaaacaaaatttttgttgttataatatatcaagataattatggtatgacctacaagtaaatgtccactcactttgttattcagttgcatcctagctacatactcattttactcttgcttttgccctcaattattcatttacattatagctttagtttaccttttacaaatggtagaatccgttcaatattttagaatattccagaaaattccagaatcgcactttctcttcagataggatgatttaaatgcattattttatgcaacagatgtgtagagcaaaaaggaattatcatggtagtttccatggagtaaataatatacatcaaaaacacaaaactcaataaaatgcagataaaagtttgctgaaagttactattagaaattggcacaaatactcttctgacaaacatggcccataatgtattgtttccaacacaattttgtacatgatggagattggtgaactgcaagagtattcccagtgcctttgcccaatgctactgttggttgcaaagatcctcaggaaatcattagcaaactccatctagaaacagaccaaaagatcagagatatacattacatgagattcatggcttatggttgtagagttctgtgcgcattcgttcttgtttgaagtacagtatagtgtttcaaagcatctgctcccattcccaaaagttagtgagttgtaactgtgccagtatctgattttaacagtatgtcaaaggcacagtatttgttcttaaatgtcagtcattagagttgggcacctacacaaattcaatgagttccagtggaatgataactggttctttaagctgcaaaatatagagagactcagaaactcaaatggagggaaatcgaccaccaatttagagatagataacctgggacaaatagatactatctgtaacataaaagattgacttaaaaatcttgaagcattattctgaatatgttttcagctttccagaaacatgaaatgtattctcatccaaatagaaatcgctccccccacctccacagtacacacacacacacacacacacacacacacacacacacacacacacaatgctaaagcaaatatagcaaacgaaatatagaaataacaaccagtgtcttgcgttggaaatactatggtctttgaggctggacagacccacatttgaattctagctctcgcactcactgactatgacacactgatcaagtcacttattctctcaacctcagtctcttcctctataaaacgggtcaaataattattgatgtgaggcatttctgtgaggataatgtatatcaattgtctgacgtgtgtattcaataaataatgactatcataactactaatttttaagactacatttgacctcaaagcatgttgtttatgtaaattctataattttatacaaataagccttgctacgtaaaggaatgtagaactaatgctgataacatattgaaagttttttaaattactaaattagcatgtgattatctagcagtctaatttaacttgtctttgatggaattgctagctttttctcccatgaagcttcacaaagaaagcattgcattaccactagacgttttcayttttccttcaataataattttgtgttctcataatttgtataaatgccatataccctaacagaagtttttcttacacattatatcctaatatcagaaaacaataaaataagaaaagcaatttgatatatgtttccacacatattgcctttttttttcttttaactttattcccacttgaaaatactcagtaatgtgtctcttgtgtctctcttctctcccaataatcaaggtctctccaggacctttccaagcaaacagaaatcccttatggcacagtcctagactctgcggtatatgagcatgtccgcatgaaaggactgaatccttttgagagggacagcatgtattcccaaatgtggcggatgatcaaccgaagcaatggatcggagaacaatgttctggagtcccaggcaggcattcaaaaggtactgtccatggttctcctttaatagtccttaccattttgtgtcccatgctggaattgcrcagttgagatttgttttttttgtkttgttttttgttttttatctttaatgctgacggcaaatttcctgttacattgcatcttatattgatttaaagaagattttttagggaattcaaagtcctctgtagtgtgtctaacagatcagtttccatttgaattccaaaatcaaatacacacactggtattttgttcagaaaagggttaaggacttaacaaacatgaagtttaaaaaagtttttataaatcccattccaaatatcattcaagttatctgattcttttaaatgactcagggtattttctacactacacttgtttttggattaaaccgtcatctttagttgtgattatgtgaagctatctggaagtaaaagttaatcttgtcaacaaataaggttcctatggatgtctgtttctattccaaatgtgaaaatctttatttacatcttactttttctataactatctatattaaaaaggcatagaaagactgtttttcttttatgtgaaaatcttaaggctatttttactctgagctgtagcttataaacatatatacggaagcaattcaaaccctatcaacctctatgagagatctgactgttttttcttaaaattatctctagtgactagcctagtgaaaatcattgttgacatttaataaataattatggaatgcaggaatgaacgtcagtaatagcagcaatagtggtatacactttttctctctgaccttccactgcagaataatttggactccaagtctgtgtttcctgttctaaaggcaaactcactaatgtcatcctagaggatattttgatgactataaaaattattctgtgacaggttccagcattattctctgctttttcatctggcaccctttatctgccactgctactactatggtccctagagtcagcctagtaattcttgcagtcaacatattgatatcattcttctgagagctggtgatgctaacataaacctttcttcaagtattaatgatgtctttaaggaagtgaatgtcctggagatgttagcaatggcctctatcctctttgcccttattataccccattttctggggctcagttattgattctaaaatatttcttggctttctccaaagaaccattggctcctggagtttcaacatggttctcccagttaatggggttcgggttgagagatggatccaagtgggtgaatgaacatgtatttttggggaagggaggaggagggtggacattttaaggcttactgggtactcatagcatgttaatgaatttgtgttcagaataagtatacactatggctttgaggatgagttattttcctttatatcatctgttaaaaatgaatttgttttttgatgattaatataaatagaaatttatagttcatatttctattccattttaggagccaaagctccccctgccttataacctcattctatacagtattattgcagagaaatttcattttattttctcccaccagcctggtgttaatgggcacatcaatccgggtttgaatccagctcatttttttaaataaaatgtataaacataactagctactcaaaatctctgggccttgagagttgcatcatgaagataagaattctacctcacacagtttttgtcaagattaaataagataatatatataaagcatcaataagtagtatgagtagagccataaacctttctcataagatggccctgaagattacctgagacaatttatatgtgagggatttgtaattataaagctttattgtttaatatttcctaatcttaatgtaaagttgtgacataataaaaagaagaaacaataaaagaggtagataataatttctattctttgttagtctgttgataaggagggctaatgagttcgaaactgcaaatcaagtcctcaaatatttattataccatgttgattcagttttctgatttactagagggctagtgaaaatgctcttctgaatgaatttataatagaaaatatctaagtgaaatttgtttgtactatatatttctttcaacccaaattagaaacagctgacaattgattagacagagagcagctaataataatacgatgtattttggttcaagcttacaaggtcttggccagcttctattaaaaaaacaaccaacaaacaaataataaccttttcacctgataaagttcattggagtttcatgaaattgagaactatgacacatggaatgtggttgtggattcttattcaagaaactagtcttgaacatttcacacagcagctttttattctctgtcattgatttctaatttatacaggcagataagacatcagaggtcttttaggtcaacatttcacaaaaggccacacttcttctataatatcttgggcaagaatccatatatatatatatgtatgtgtgtgtgtatgtatatactatatatgtatgtatatatacgcatatactatatatgtatatagtatatacatatatatatacacacactatatatggatatatatatagtaactgccttccaggaaggcctgcatcactgagaaaaacagtcctcacaatctataactttaaatagattccattaatgtctcagtctgtatttgttcttaattgtgctactagtctcattaagtttctcttactcgaaggtagataccgatctcatctaccatcttgtttcggcttgtaccaaagaaatctgtgtaaatgagcattaagtcgatgagttctgatttgctaaacttggtagcaaactaccctaagtaaactagacaaatttttttttctgccttgctttaaccaagatcttttgcataagtagaaaaaatatgatttttaaaatgcagctgaattttttatgcattcattcaacaattatttattgagcaccttctatttgtcaagcagtacattagtcactgggatggacagaaatgaaaacaaatgccttcatggagtttgcattatagtgggtataaacaataaacaaaataaacaagctctgtggtatgttcagtagtgagaattgttaaggagaaaaaataaagtaggagaagaggatgggaaataccgagaagcaaggtaatctgctttattaaatcaggtagccagggaaggcttcactaagaaaataacatttgaatacaaactttaagcaggttggagaggggagagtatgtgtacgtctgagtaaagtgtttttagaaagagggtcagccagtacaaaggccctgaggtagaagcatgcctagatgttccaagaatatgaaggrggccagtatggattcagaaataagggataatatcagaagtgcaacaaggtcaagaggtaaaagatctggaggtagagagcagatgaatcatgtagggtctagcaatgcaaagtatggtcctgtggactagcagtgtctgcatcacgtgagagcttcctaaaaatatagactcttatgcccctatcccagcctttctaaacgtgaatctcattttaacaatatccataggtggttcatatgcatattaaagtttgagttgtgctaacacaggctgtctagaacatcctaagttggctttttctctggtgggatatcaaacctcaggagagttttgaactgaagagcaacatgataacatattttggcaaatcatatgactattgtgctgaaacaaacggaagatggcaacatggaagctggaagccagttaggaggccatgatggtgactcagcaacattctgaaattacaccatgggaagttcatttctcttaaaacgcaaatacatcttaaaagactatgactttgagtagttactggcattagcaccttagtggaatttagtctattasattattttagatgggcctaggacataaacagatacagcttctgagagcagttgtagaaacttccaggtggcaggtaaggatctgaccagaaatyaaggatcatgtgcagcactaaaatagggaagtccctgattattatgagggccatattcacttcccattaatctattataactcttggggaaaaacaaatcattctagaatctcagcatagaagaccactagagaagtaaataaaaccaggattggtaggatttgtaagtgaataatacttcagactatgaagttccaaggggatgtacactcaaatggataccatagtaacagggaagtcggtggtggtgccagcaccagcagtattcattcataaagatagcattaatgtataggctgtctgtccacagaagtccaagagcaatatggggaaaggggtgctattactggggggaactcacaagctccaaactgggcatcagggctgcaaccaagccactggacttcagggcctagctctaatcctagctggaaaactgaagtattaaaatggaagccaaggcaaaagattagtcataacaatatgggccagtgtcatgggttttagaagactgaggaaggaagacaaatcccagaccctaagaactagtgagtaagcttaccccagttttattcagctctggctgaaaaaytcagtggacttgaacctgctattttacatactcattcaacacatattcagtgaatacctattgtttccaagtctctgttctaggcattagaaggtgtaatagaacaggtaaagttcctgcctaaatggagattatattgtagtgaagagaagakaacagacaagcataaatgtgtgctctaaagaaaaactggaagggtaagaatggaaaaaaaaaagcagatcatgaagaggatgttgccatcccacattgggaggttgggaaatacttctctgagaaactgatgtttgaatggagacctgaaagaggacagggggtgaaccatgcatatagtttggagagaggggacaggaagtgctccaggcagagggaatgctcattacaaaattcctgaggcagaagctagcttggcatactggagagaaatgtcaagaagatcagtgaggttggagcaggttgcacagagagggggttaggggatggagaggcagatggatatgatcagagtgggaggtgggcaggatggaggccattgaaaaggctgatgcttgggccccactaaagtccaaattgtatcttaattggtaaatggaaggcagctaaatttctcacattcctccaagtgattctgattcacaataagggttgacaatcactgatataatattctatgagtgattttaatgaccttagttactctgagatgagaaaccagtgcagagttttgagcagaagagtgacgcaacataactttttaaaggtccgctctagatgctgtgtggagaccagggggctcaagggtgggagcggggagcttagtgaggaggccactgtaataatccaagtgtgacatgaggcgggggtggaccagagtgattatggtgaaagtgatgagaagggattaaatttaaacatattttgaaggtagcactgacaagattttctaaaagagtaaatgtggggtgaaaaagaggagttagggatgacttcaatatctttggcttacgtaggtggagggatggagttgccatttattgagattgagaaaaccatgacaagagtaggtttgataagtcaaatgagaatttgtctctggcatggtagttaatatgaaatgcttactcattacgcaggcaaagtttatatttaaggccacaaggctggatgtggtcactgaggatatgagtatatctggaaaagaaaaacatataaacacaatttaatatttagaggaggcagagacagagagggcataacaaagcatcaggaaactatcagctagtgaggtaagatggaaaacaagagagagtaagtggtggtttaaaaaccaaaagaaaagaagaatttcaagaagttcagaggatcaactgtctgtcaaatgatgctcatgataaagggtgatgaatgctaaaaattaattttagttttggaaaccagcagtcactggtgacctgacaacaacaggcctggtagagtagaagaagagattagggaaagattagagaaaagaaaagaagtaaaagagaggatgtggagattatgagactagaaagaagagattatgagaaccaggtactggaaaaaaaatgcctgtacaaataatcgaatcaccaagaataaacacagaactaatatttgagagagtgacagagagccaagtgataaaatcttcaagccacgttggaggagtgacactggtaactgtagtaaaactacaaggagatactatagctctttttaaaggagtaactcctttttaaagaaattttgctgaaagaaaatgctgagtaatgagaggagtttctggagtaggatgtcaggtttggggaaattttttacgaaagaagacatatacagtatctgtatattgatgggagtatgcaataaagagaaggaaacccataatacaggaaaaagactgcagtattgctggagaactttctttgattaggagataagttatggcatcttagtgcacaggtagacggtttggacttagaagcacagtccatccatagtaagaggagagaaggacataagttagaagatgtggtggtgggagcataaggaagttcatccttgactgcttgtattatatttaaaccaaagtcatcaccaaagtgtaagcagcagggcagagattctggagatttgaagaaagagaaaataggaatggctgtcctggagaatcaaagagatagtaaactactaaaatataataaactttctagacaagactgaaggggtttgtaatcggtggtcatgactataaattgggaccagtcagcatgattgtgagtatttgtctagccatcatcttcagctgactgagcataagtgcaaagtccacaaagagtatatttcaccagaattagtgtttccagaaaagtatgatagaagataataggagcaagaaaggaaattaagagcacatgcaaaaaaaacataattattgttatgaatcatggaatctgtgctatataaaaggaaagtgatgatacaagggaattgaggatatgaaaagggtggcaggaacaatgcattgcgggcctagatgggactggaattcttggaatcagcaaacaagaaggataaaattggaagtaacatgaagcttgttctgagatgacacgtttgaagttgaaatgatgaagagaatacagttattgaaattgatgacaagggatttggtagctcaggtagtagaaaagacaaaatctttggagaagaggaagacttgagactgaaaaagaaagtactggaaagagatgcttatgtgaataatcaaatcgccaagaagaaacgcagaactcctatttgagagagtgacagaaagccaagtgataaaaatattcaaataatgttggaggagtgttgcagggtcagttagtgaccactcagtaacactgagtggcaggtagtaaagtctgataacataagcttcaaagctggagaattttcgggacaagggtctagaaatggtttgaggggcaaagaggataccaacactggatcctgtcccagtggtatgagtgttgtagcagagaaaaataatcaccacaagaccacaggcaatgcagtatccccagaagataagtacattctacttagcaaaataaagtaaaaggaaatttcaaaaaacaaatggaggttataggtaaggtgattatttttcctagtttgcttgggacagtctcgattttgccacttgtcccagtgttattaactgtattcccactcactctcaagagtattaccattatgacaacaaattatgtgacctccctagatacacacatcctgctgataataaagtttcatagagcagagtagaagaacctggagagttgtagaggaataggaaaactggtcaaaatcaagggatgcgcagatccatatcagtgagatttaaacagtaatctggaaatttcagactttccatgagggcagcatttaggaatccaggaccaacacagactctaggcaaattatgttgataagatgagtgtaggttggcaggaggggtgagcatattgccaggtgcttactgaggtgtggrgcccctcttcatccctgacagtggcagtggaagcttggctaacagcaatctcaccagcagctgaaagtcttgagggcattgcttcccacagctgagtgaggctgggaaagatagcagctgatgcatgctagacttaaggatgaagcagctctgcaccatgttgcacaaaggaaaaaaggctgtgagtagaaaacagatttcagctgttacacagcttcatctatacttcgtcctgaccttgcatgtcggccatatcctcttttctgcttgttccattccccttcctcctagagctataagcatcatttgtcattgagtaaaaatgccaaagtagatgacaattaatgagccatcagcagaargagggtgagggctaattggagctttagtgagcaacttgctaatatattaactaggtatatgacctcaaaatctgggttaggcccttattacagaaataaacaaactgaaaatggcttggggtaaaacaagacaacaamctcaacagctttggttctacgaaaacgccaagcctgggctgtcataccactggacttggagggagcagtgtatttgctgcatttgcccttttgccaaatgattccaacaaatacatgattcacttcagtactacaccctgcagctgagagctccgataccactggcatattttctgctctctagaaatcagagtttttaggtctgtgtcagtcatcacacaaagaaagaagagaactgcacagtgggagaataaaaaagatgtagagatcatttccagcagccgtgctaatgcatttttaatagtagagttggatttttttaaattattattaagacttatttttgtttttaacaatcctcatggatatttgaaatcaaaatcagactcgattagatgttttctcaaaaagaaaaggagaaacctagaatcattgtgacacatgtaaagttgcttatgaagacttcttaggtcatcaccaggaattttacataagttacaatgtgtcaagttttatagcagacaaatcatactacaaatactacaaacaaacatgtttttctagatgccaagaaaaaatatatgtatgtatgtatatatatatatatatatatatatatatatatatatatatatatgtatacaaattctgtgaattatactggatgctgatgcaacagtgaagtactgtcttatgtacataaagatgatactaccaacctgctgttgacagagtatgttcttttaaaattgcttttttccacagtgatttaattcatgatgaaagccagatctgctccaattcttcttttaattagctacattcaattctaattcatctattcattcactcattcctttaatcaacaaacatttattcagtggctgctaagtaaaatgcagaacagcaggtaccccacagagatttgtacaagacattgtgagaacacagggaaagggaacctagcatagcctgaaggatgaggctacttcagatcagtgaagacttcctaaaggaagtgatattaaacttagaatgagtagtatttaattaggtaacagaaataacaaaaaaatgggatagggaggagaggrcctgagcaaaggcatgaaggtgagcagagcatagtatgtgcaagaaacaaaaagcaattccagttagaagagaaggtgctgcaataaagtggtgggggaggaaggtgcttgtggaacaaagacacctactgggccatgtatcactggaacttgctaattggacattaatataataattcaaactagatgagcaataagatgtaaaaagaatagcaggagtatttgaaatcagtttctcgattgtgaagaatagagagccactttggacttagttttcttccatattttaaaattgtggaaacagaatttattaattctaagattttttctggaatgaatattcagtgagtctttggacactaatttcaaactgtttaatagcttatgagagaaaatgcttcctaggaaacttcagaggactgtagtgggagtccctaacacagagaccctaacatcaagcctatgttgttagtcctgacttaaaacacagcctcatacccaagtgaaaaaattctccaaaggattttccagctttctagttccccaggatgaaaaaagaatagattgatgcatctttgtttcctgctggttgcattatattctcaaacttcttattccaataaatatccaaggtattgccttggtttagttcttactctcaaagttacttcccaaattggaaaatgcatatatattttttaaaaattttctgttgggtaaataccaaaaattaaaaattataatcctactgataccatttggctctgtgttcccatccaaatctcatttcaaattgtaatccccatgtgtcagggtagggaccagataggaggtgattggatcatgggcgtagtttctcccgtgctgttctcacaatagtgagtgagttcttgccgagctagtggttttaaagtgatatttcctcgatttcacactcattctattctgctgccttgtgaagaaggtgcctgcttccccttcaccttccaccatgattgtaagtttcctgaggcctcctcagccatgcagaactgtgagtcagttaaacctcttttctttatcaattacccagtctcaggcatttctttatagctgtgagaaaatgaactattacacctaccataatttaaaaattattttagtctccaattttaccctcagagtttacctccattaatagcagagtatacatctttatgacttccttctttatttaaacaggccgggcgctgtggctcacgcctgtaatcccagcactttgggaggctgaggcggacagatcacctgaggtcaggagttcgagaccagcctgaccaatatggggaaaccccgtctctattaaaaatataaaattagccaggtgtggtggcgcatgcctgtaatcccagctactcgggaagctgaggcagaagaatcacttgaacctgggaggcggaggttgcagtgagctgagattgcrccattgcactccagcctgggcaacaagagtgaaactccatctcaaaaataaaaaataaatataaaaataaaataaacaggagacatctgcaaaaatcacacatacgcaaatagtcacacatatgaatacaatttttgtttaatttccattttgactttttaaaaaataaaatgttttcatgcccttgtctttttcaattcctttgtcaaaaacatctttcaggttagtgtgtatgtatattatacatatgtaagtttcattcgctttctgtggctcccagtccctggctgttcttttacatcctcaaaagggccctccctctcctctcattctgatttatgtgttcagtgttctacaattttctccttctcaactgctaaattcaattctctgactaaacataaatgccatgactattagcatatctttctgtttttatgtttctcagattaattgtcatcttaggcactaaagcttctgattataaattcctcctttcttgttaaatatccataactctattatttttcttattttaaatcaatatgtcttgcaaaatcctttagggctctgctatctggcgccagctttgcctaggagataataaaataaataaaatttgaatgtcttgatagtgtttgggggaaataaatatattacagtataaaaccatgcttatgttttacagaaaataactggcttcttccattattcctttatttctcctattatacctaacattaaatactggagtccaaaagtgcacaatacattttaaaaaactccataactaaagataaagcttctctttttatgtgataaaaattggcttgtaatataatctaagcacatcacattcatagctttcatatttaaagttcattttttcaatgcaaatttttattgaaattttaaattttatttattttttaaaattataaaatacatgtaacataaaattcaccatcttaaccattttaggtgtacagtttagtagcattaaatacatttacattattgtgcaaccatcgccaccatccatctccacagccctttttcttgcaaaactaaractctgtacccactaaaaattccctcctcccattccctcttccccccaaggccttagcaatcaattatgtctctacgaatttgaacattctaggtatctcatataaatgtaatcacatagtagttgtccttttttgacgggctttcttcacttagcataatgtcctctaggttcatctacattgcagcatgtgtcagaatttccttcaattttaaggctaaataatattctgttgtgtatatgtgtatgtgtatatatgtgtatatatgtgtatatatgtgtgtgtatatatatcctgcattttatatatatgctatatatatatgtatatacatatayacacacacacatatatatcctgcattttgtttatctgttcattatcaacagacatgggttgcttctaccttttggctgttatgaataatggctctcaattatcttgggtatatatccagaagtggaactgctagacgaaatggcaattctagttttaattatttaaggaactgccatactgttttccataatggttgcaccattttaccttcacacaaataatgcacaagagttccattttttttttttttttacattctcaccaacatttattttgtttttttgatagtagccatcctaatgggtatgggatagaaatcatgtaaatctaaattctattttagtatgcatttttaagaggcactattttggctaataaacttcaataactatcttcttcacattatgctccaataaaaattggattgtgcttgcttatcatataaagctcagcattcctgagaggtaagactcaatctatcccacaaatatggctcatcccagtagtgattctcaaagacagaagagaccaataacctattaaccagcccccagcaaaagaagcaagtcagaatgggggaaggaagtatgtatagttcaacagaacaaaaactcatgttattcggacacatccaattgagaataatttgttttcctaaactctgggaatgtttatctctgccattgmgattcctagaactcatcacagttatggagctgaaagagactgcagggaccttctagattaatcattttgttttatggatgagaaaattatacctaaaaaggttaagtgatttacccaaggccacacagctgattagtgtcaatatttatatctgcagcccacatctcttaattctggtcacttgctctttccatcacagttaaaaaacttaagtctgtaatgtcctctcaaaactaattaaaattcacatcacaatttgagtggttctcaaactttatatgctattaagaattgcctagtgaggctgtccaaaatgcttattcttaaacctccaaacccagatatcaagattcacggagtctggggtgggacccaagaattaaattaatgagcaatacagatgattctgataaacattgttcacagattatcttctgagaatcactcttctgggtactatttaaaagccctggtcttaagccagtgatcttcaaggcatgggccctggtccagctgcatcagcaccacttggtaacctaagagaaatgtaaagtcttagagcccacggcagaactacctaatcagagactcttggggagagactagaacattgtagattrataagctcttcaagtgattccaatgcatctaacatttgagatccagtggcctaggctcaattttagtccaagcaagccactcactttattatgttgccttccaactagaggatttaggaacccagggcttcgggtgcatcaaagtaatccaaaatatttgatcaccctaactgatactgccaagagtgtgcgtgtgtgtgtgtgttgaatgtttcaacactaaggaacaaaaccttccctgtctttgctccttacatgcaattgattgaaaagtagaggttaagtgaggggcatatcaagtggcaaatgttgcttcccgccttgtgacatcgtttacattttaggaacaaaacaatacttatctgcttgctgcaaatcttcacctggatgtcctgtcagtgctcctgccagccatatgtctaacactcaactaattacctttctttgcaagttgacgcttatctttctgtgttctttatttctgttaaaagcatcactgccctccctatcatcaggctgaaaattgaggaatcattttcattgccttcatctttgttaccagagccaaataattgctttaactatcaatcctgcctctgacacatctctccaatttattctctcctttcactttctacttccaatttagtaattcatgtcattattaccatcctcctggactacagaaataactaactaattggccccctcctgcaaattcatcttccctcagcatagcactgaaagtgatccatctttgctcaaaagcctgtaagtgttccactttatctctagtgcaaattgtttatgctagcattcaaaagtctctataggttggtattattctgtttttcagtattcatttactcattcattacttaaataacgcctattctgtattgatttgggtatcttccctttcacatgccatacattactatcaaaccaagttgctggctttgtcttatactctgcaatgttcttacatatcaggtattgctcatttctttccctccatcaggaatgcactcctctgcctgccttctttttctgtctattcgttcttcattttcaaggtctacctcagttgtactatgatgtctttcctaaaatattttcttcctccattaaactttcttaacaatgtatccatctccacaaatggtttccttttaatactgtaattgtctttgcttgtctatccttctagatcatatactattttgggccagaacacatacctgattcatcagtgtatccctctatctctacagcattgagcttgattcttaatctttctttmcaacttgagtgactaaaatatttaacagaaatcaatatcagattattcatgaatttagatcccaaaatgtctaagcctgattcctcatagtgttcctcttaaacagactagatatttatatattttccttatgttctgagtagtacaacttattcactatctttaaaggctcccagtaaaataatttataagaacagatttcagtacttttcaattcagtttaaatgctatcagtcttgtctggtatgtttatgtaactgagacttatcactttgattagggaaggatgccatgtagaattatgtttcaagtgtggcaaaatgatcagttgtatgtatttgttttgcattttttgtctagaaagctgggaaataaggcaggaaagacagagtaagacgaaggctaggctcaaacaaatttggcatttccctcaggtgcataaattaagggggcactaaacaaacagaataatcagatgggatcagcattgcttatcttcccttttgccccaggcaccaatatggctccacatggtactggcaaacctagtctttatttgaaattttgatattttataatggatttttgcatgaattttgttcttttcttaaaatattgcatagagtattatttatttgattactgagtttggtgcacccttcaattatgcacacaggacaggtgctttactcaccttatcctagaggaggccatgagaaggaagcagaaaacaaaatggggaagaaaaaaggaaggaaaaatagataagatgaaaggcatgaagggagacagacagtctttattaaatactcttaatctttaagtgtaaatattatattaagttgataatagataaacaaaaacaagtatgatgaaagattctgccaacattggtgtaagcaatgttgtttatttgtatacaatatgtatataccatagacagatgtacattactacaatatatatacatattacagattgcatattttatttctgcatattacaatayattatgttcattgtattaactcaggaaggttgattctgaattatttttatttttcatatttatgtttatttttccctattagaattagttacaattttaccacattttagaagaatttacctgttaatctctgacaatttccaaatcatacttaaatatttctttaagaatcaaagataatatttgacttaaacttttgttgtttgggctaaagaggaagataaaaaaggagtttgaatctgaaattccctactaactggttatgaggcctagtcattgttctgagaaatcaccaggtaaatttgcctaaacgttgcacataatttgtaatttaccccaacagagggataatgtgtgttaaaatatggaaaatgtaaaagaatgggatcaataaacttgggctaattcaatgaatacatgtattttaatctcctgagtgtctggggttttttaacatttaaaaattaagtgctctgtagtgtaaagatgtagtgtttgttttgaaagagcacaggagacttccaggaaagagtagctactcacaaattattgctttcgccttccatgacaaggccaacaatatgctttcatttactgattctcatctaataccttaagcttgagcaccccatctgctcagcagtatgtaaatgtgatggaaggtttctgcctcaaattatactgtcagaaatatattgcatttaatactttgtgtatttaactctgtgtataaaatattcagcctgcaggagagttgtgaattacagtcaagtgaaatgctgtgcttgaattgtgaagctcaagaagcttttatcagcttatcaactcaaaatatcaatattctcctgcaccatgttaacacaaatacatttatgcaattccagcaacagagatggtcttaccatttctccatttggcactttggatataataattatatgcaaatttggacaaatttcctttctgctttagggaatctaatttagtttgtcaatctagctgttttttagaaattgctccacatattatacacaataataaaagactcaaatctcattttctaaccctgcactcctaacaacatttcacagtattttgcatattatttgataatatactgtttgaatcaggaatcttatccagagtcatagaattgctttaagttttgtcttggtgtttgtctactaatgtgcacattttttcagttgcgtgtgctgggagagccaccaaatgatgtattggaccaaaaatatttacccatttgatattctctattagtcatccagcaatttcaaacttaatatatccaaaacccaacagttgtcccaccttttatttttttctttttcacttgatagcaaattcattcttcttagattgactcttgtctttctcttacacctcatgtctaattcwtcagtaaatcttgtagggccctttctttctctcttccttccttccttccttccttccttccttccttccttccttccttccttccttccttccttccttccttctttcctttcttcctttctttcttgccctccctccctcccttccttacttctctctctctttctttctttctttctttcttttttgacaaagtctcactcagttacccatgcagtggcatgatctcagctcactgcaacctctgcctcctgagttaaagtgattctcccacctctgcctcctgaatagctgggactacaggagcatgccaccacacccagctttttttttttttttttttttttggtatttttagtagagatggggtttcaccaggttggccaggctggtcttgaactcctgacctcaagtgatccacccacctcggcctcccaaaatgctgggattccaggtgtcagcaaccatgcctggcccctgtaggttttttatttaaaaacatacaaattttcaccacctccaccattattaccctggtccaagccatcaytgtctctttcctggattattgcaatagctttctaccaagtcttcctgattttactctactttgccatagtctgctttcaatattgcaatataagcgaacaggtcattcttctgctcaaaattgttcattggctccccactccattcaaggccaaaaactcttacaatagcttgcaaggctgaatatgatctatgttcacccacctcattatctttctggcttggcttatctggtttctttgctgtttcttggttgtaccaaccacactccccttttcactggctgttttctgttcttcctatctttccttcccctaggtagcttcgtgacctactttctcaccatatttgagtcttagttcaatgttaccttttccagaaactttccctgacttccctatttctaaatgcaatacccctgatacctcagcacttcctacacttctttcctgcttttattctgtttccatagcatatgtcacttactaatatataatttacttgcaattttatttttaattaccttatagattttttattatatgtatttaaggtttacaacatggtgttttgatatacatatactcagtgaaatggttgctacagtcaagaaattaacatgtctaycaccttgtatagccatctttttttatagtaagaacacctaaaatctattctcttagcaaattttcagtataccattttcttaattaactgttctagtataccctgcactagaatgtaaactttatgagggcaagaatttttgcctttttcactcactgatagatcccaagcaccttataggtgcctaaaagatagaagattctcaataactaattgttgaaaaataaatttggcccccaaaataacccccaaaaaattaaacaaaagtgaattgataaaaagcaaatgcctctatgatttccttttctacagtaagaaattatttggacaaaatagtcaaagtatattaaattaacaattcttaagttttagagtttgatgatttgatgtatgtatacattgggaaatgattaccacaaccaagctaactaacacacccatcacctcacatggttactttttttttttttttggtaagaacacttaagatctactcrctgagcaaatttctagtatacagtatgttgttattaatcatagtcaccatgctgtacatcacatttccagaacttattcatcttttaaatgaaagtaaaatatgttgatcctttgaccaacatcttcccattcctcacctccaccccagsctctggtaacgaccattctactctctgcttctatgagtttaattttttttagattccacatgtaaatgagatcatgcagtatgtctttttatgtctggctgctttcctctaggtctatccatgttgtcacaaatggtgggattttcttctttttagtagttaaatacattccattttatacacacacatacacatacacacacacacacacacacacacacacacacacacacaccacattttctttatctattcatacactgacagacattttggttgtttccgtatcttggcttttataaagaatgccaccatgaacataagaacacagatgtatctttgagatgctgatttcatttcttttggatatatatccagaaatgggattgctaactcatatggtagtttcatttttaatttttcatggaagctccgtactttttcccataatggctgtaaaaattgacattcccaccaacagggtaacaagggttcttttttctccacatactcaccaacacttactatcttttgtctatttaataataccaattctcacagctatgcagtaataactcattgtggttttgatttgcatttccctattgattaatgatgttggcattttttcttatacctgttggccatttgtataccctcttttgagaaaatctattcagtccctttgcccattttttatttgggttaattgttttcttttaatttagttgtttgagttccttatatattttggatattaacccttcatcagatgtatggtttgcaaatattttctaccatttcctaagctgtagcttcactctgttgattgtttcctttgacgtgcagagctttctattttgatgtaatcccatttgtttacttttgcgtttgttgcctatacttttggtgtaatagccaaaaatatcttaacataaatttatgccaagataaatttaactaagagagtaacatatctatacaaagaatactgtaaaacattgatgataaaatgaagaagacacaaataaatgaaaagttaacccatattggtggattggaagaataaatattgtttaaatgcccgtagtacccagagggatctatagattcaatgaaatccttatcatgattccaatgactattttacgtaaatagaaagaacaatcctaaaatgcaaatgaaactacgaaagactacaaatagccaaagcaattttaacaaagaagcacaaagctggaggcatcacacatcctgattggaaactgtattgcaaagctgtggtaatcaacatagtatgatactggcataaaaacagacacataggctaaaggaacagaatagggaccccagaaataaaccaatgcatatacagtcaactaatttttgacacggaaatcaagaatacacaatggagaagggaaagtctctttaatagtgttaggagaactggatatccacacgcaagagaatgaaactgaatccttatataaattaattcacaataaagactttattgtaagatgtgaaactctaaacctcctgaaagaaaatatagtggaggaagagccatgccattggtcttgacaatgacttgatatttttgacttttttttttttttttaacacttgttgatttagagattcaattgtcagcttttaaattcaatctactttgacttgtgtttttaatgctggtcatggctgaaaaagagaccacacaatgattaataaatcaaataaataagggacatatttgtgcttataaatgatttaaattttccaacataattcagtcatgcaaagttttttgataaaattttgacagaaatgtgttctgtcctttaaaggatagaagttttaaattttgatgtattccatatatcttttcttcctttgtcattggtgacatacctcgcattgttaatttttgatgtctctgcatttttttaattagacttctttgcaatctcccctttataaataacactcaatatctaaaaaaatccttgaaatcttataagcttctacttttttggttgtatctctggccatgagattatgtataattattttctgacttgaaaaagtttgcttttctgaaagctaaagtgtttatataactcatcctaacataactttccttagttagttaaacttactaatggcaacatttcattctctaaggctattttcatttycaccccatcaagtagtctctcgatttattattttatgccttcttttagtgtttacatagctcctattttctgccttgaattaagcaggtttttgagagatatattaagatgagaagtaagacacagagattttgcctacaaggaattttgccttctaataaataagacaaatcaattttataaaaacaaatggctataaaacrtggtaaaaagtgataattaccatcaaagaaaggcacaaattaagttctatgtgaattgacagaggaaaagataattcttttcttattttactattttcagaattaaatctaaagtagcagtttttctcattatccctttggttcctgtgagataaaattggctagaaggcaaatgacaacttcattcacaaattacatttgattgaaaggaaattgcagaaagatatttggagagttgatgctttctgtcaacattacaacttgtttctccattagccttgtggtcctcattagagatgtttgatccttaacctctattgactaagcaaaatgcagaacaaccccataaaattattttttaattctaaatatttccccctttgttacacccctttacttcatatcagaatatgttcattttttccttttgttatataggttctttttatctcgtttttacctccataatgcagttactaaacaaattttcacaaatcaataatttctaggtaaggctacataaggttttctatcctgaaatatttctgcaaygtgaaactatacaaataaatattttgttacataaaaaatttcaggaattacctgtattctctttttaaaatttttattcgtttattaaaaattgtatactcaaatcctttctctgaacactgttctttaataaaaagtaccaggaatccttagagaaatggctgatgttaagactggtgcaggaaaaatagaaggtgaatctggaaaattttttcattccagaaaataagaaagtgctcaaataacaaaaggagcaagtagggaatgctgagggacaaaggggccaagtggaaacactttctcatggccagaacagaaataacacaagaaagatgaagaattgaatattggattacaacccaaactctaaatatacaagttcatagtgatatgaaaaaaattattgaataaaaaaagtgggagaagaaacaaatatttcttacagagaattttaaataatacgtgtagatactgcgttcctacaggagctttatactcctccattcacgctttaatgtggactggacttagtgattggtttccaaagaaaagagtacggaacaggaaaaaatagagatatctgacaaacactaccttgatcaagatatcagtgatatatagatatcttgatctatagatgggagaggcattccactaccatggtattctttcaaaaaaattcataacccaagtctaatcatgagaaaagaaatcagataaaccaaaattaagggacatactccaaaatactacaccagtactcctcaacactgtcaaggttatgaaaaacaagtcaagatagagaaactgtcacagtccagaggaaactaacaagacataacaactaaatgtaatgtttgatagggttgggaacagaaaaaaaaaagacwttaacagcaaaactgttgaaatcctaataaaatctgaggtccagttaatagtaatgtcccattgatggtttctcagtttttacaaatgtaccatagtaatgtaagatattaatattaggggaaaatgggttaaggagtataagagaactctgtgttacctttgtaatacttgtgaatctaaagttattccagaataaatagtttacttaaaagctatagaaacatatctagatttttctattttaggcatgaactgttatttctgactgtggaagacaagaatttagtttctgtccttctcttgcttctaccatacatgtacaaccttcccatctaccaaatccccattataattgtactcatatcaatatattgtatatttctattcacagctgacccatttaacaaactgtaattacttttccttgttgcctatcctcttgttaaactggatttagcaattatctcattttgttcatttgtttaatgtatatgtccttagcacttattcaacctcaagcttttctccattgtctaagtctcctttcataatgttcaaatgtgcccagtattctattcatttctatcgatatggtaaaagatgtcttcacaaactgttccttcaccaatattctgttttcccttagcatgtgttaggtctcttgtttcatgtatttcatgctttttttccttggtttactctttgattttggtaacacagtatctcataaccttcttaggaaaaatgagttggagataaaattgtgagacttgcatgcctgaacacatcactatcctgcttgcattttatttgcagtattggttgggagaatcctttcttccttcagaagtttgaatgcattgttccatggtatctaatatttcagttgagatgtcagaaatatgtctgatgggttttttttgtttgtttgtttgtgtgctctggaagtttgtggtatctcttcttggttccttgtgttctgaaattttactgatatgtccatttctatcatttgtgctgggcacctgagaggcccatttaatctataaactcatgttcttcagttctgaaagttttaaaaaattattttactgatggatactttacttcaattatctatttttagtttctttctggagttcctagtatttatatttaaagccttctgattgattctttcttatttatrtaattattcaatatttgtgtgattttttccttggaaattttctattcttatctttcaaaactcctgtttttcatgtctactagcattttttaacttcaacagcactttattgtcctttgaatgttgtattttctttagaattcaatatttccttattgcgatgttttttaactctaaatatatatataaggatagtgcttttgttgttgtcttggttgtatggattggcctttaacattttcttctccatgcatcgtctgttgctttcaagttgctttttcttttctaattgttttagtcactattgcaatagagacttttgatatctggtaaagtttgaatggaggcccatattttaaaattaagaaccaagaagttaattggcagctctgaaaaacaactaggcataaaaagagagagaaaagcataccccaagtaaaaagaaaagcaggttgtgaaagacctaaggcagggttgarcttgtttcattggcaaaatagggttacaaatgggacagaagagctggactatggtgaggaagggtagaaatgtaagagatcttaattttgcattccagagagaaagttttaggctgaggcttagaccaaaagctcagggcaaaggccaaagagtttcatgatttacacctggaaaatggaaagcacacaatctgtccaggcaggagtccagctacagctgtcttctgcaaactccaagaaaataacaagagctcctttttatgaatgctgtatttataagtcacatgtagctttgtcttccactgaactgtagaaattttggttcattaaatatcaacttcctcattttactggtgaagaaagtgaggccctttcttaaacatattaacatttttatcactaaaaattctctattggaatttacaattatattgagagactataaatatgctactcctagcatcatttaaagttcccaaaacccaaatgaaaaagaatatgacagcccgacagaatttgtttacctaactsgaggaaatgtcgttgagagacactatggagaaaacagcctaactcagtgaaattgaagtatattagattttaaaaggcagaaggaagacaatgaaatctaagagacattttcccaaaaggcacttagtacatgcggacagtaaatcccacagtgtcagtgtgctttttgttcaaagtgcgcagaaattttcttgagagctgtagaattataaaagttaacaacatgactataatgtttcccagcaaaacaccctacaagacagctctttaattgtaaggattcaacacttttagggtacaagtgtattctactcttgtcatggagagagtgagagttaagtgattcttggggtattcttctcttcaaatgcaagctgtgggtcccatttgtcaggaaaagaaaaataaatacaaccccggtgtgagaataagaattctctctctatcttggttccacttaattgtaaaaatcttgccaaaaaatatctgatatatatttcaaacattttgtagtcatttacagactctcatgccatttatacatggtcttgcaggggcagccttgtgagctgtgtctcatttttctaaaaccactagaaggaaaactttatgcagtacggtttgggagttgctctatacaatgtgacacttgatctgaaataccaaatggcagacttttacacagtaacttgaaaaaattatcctaattttgcgtttcatgatatcactaatgcataatcagcaagtaatgattaattactcaatatcgcccttaacttgggaaccctcatcattctggcctctctttgcaaagatgtatggacaataagttatggaagacttgaaaggaccatttcatgtgaatttcctgggaatattatattttcctaaattgaactattttactttagcttgccatttaggctgaaatgattccttactttgcccaacttgggtcactacccctcacatagccctctttaatgttcttcagttcacataccactacctaaagttaacttgattttattttaacttcagattgtctgtttcctctcactagactggggcaaagtgtgggcagtagacaatcttcaaagaccttgtctgtctcctctgttgtattcattgctgtgtttctacccacctaaaataatgcgtagtggcactgaattaatgtttattgagtaaaatattttactatcctgtacccagcctttgatgacttgccagaactgagccccagaaaaaagtaccttttctccttggtttcaataatttttcttttggattctactgaaagagaaaatgtggaaagaattactgaagctagccataactccaacaaatagccaacaattctgatygccagtattaaaccacaaatttgtaacataaccacatcatagaataagaaagtacagtttcattgtttctgccttttttcactggaagtaaaaagagcagaaaagagcagaggatgggtgggatcataaagtcaataagatacgggaagccatgatttcttttagcttcactttcccccaaggaagatgctgaaaaagtgtgaggagggctggaaacatcacctacctgagaagaggtgggtctggtygcaatgctcagaaggcaggaggagaccagggcacccagcctctgccttcttattcataacttagggatgcagaaagaccttatcttattcccctactgtcctgtcccgaccattttccttcttctggtaaaatttaaattcctctctgcccagcatcttctcctttcctagaagcagtgatcttaaccatctttcttcctgaagccatgcttgcgtagatcctggtcatatatgagcttacaggtcatgaaagccatcactgaggttacaagccaacaattttaaggggttacacactcatttctacctcaagccttgatattgggcatttgccaaaatgcgagtggtctcctaataacaggtcactgattcgcactgcatcccttccccaagttctcttctggaaactgaacagaagaaatatgatttaaataaaatgaaaaacaccctacttttgctaccaatatttcctaaagttcaaattgaatttggatgctctatgtctgtgattgtaagcttttcaactctcagacagtttgaaggcaaagtaatctgtagctttggtataaggggaaagaaaggagagaaaaaaaatatgaagtacttgactgtcaaacttaataaatacattttaaaagctgatttttaaaaaataaatttttctgagttgccaacagagtaaacattagtaaactttggaggtatgtctcaattatttctctctgattgctgtgcattaacacattatacacaaagccctgaggaaacaagaagaaaatgttatgttaggtattgttataaactggattgtcagcatgaatgagtgaaaataaaattgctggaaatatttgtttattcagttaagccagttggcaataaaatagaatgtattaatgtctcagtagacaataacttcaatgtgtgagaatatcaaacggcctgggagtaagggcaagggagtgagagcaagagaatgaaaacaagagcaagagtgagagtgagtgagagatagagagagagagagagagagagagagagagagagagaagcagcactcactggatcacagggcacccagaaacttatggcagcacagcatcctaaagtcacagtaactgcactggcatggcctttgggcgaccttgaaaaagaaagcttcttattaccaagagaacaagttgtgcagatgctgttataagaacaaaccacaaaaatgcaaccaatgtaagaactataaacttgctttttatattattcggcaattattatcaatgcttttatctattgactsctgaatatttggctctggattaatttttgcacactctctatattacatcaaatactactgtgatgttttcatgctagacacatttcagaggaaagtgcaggaaattggatatagattgccttagttctgagaccagctctcccagagatttgctttgtaaccactggtaacagaatatttttgttttcctcattagtaaaataaaactaatgacacttgttctcaaatgtgtggaatagataatatggaactcctttgagmtctctgggaaataatttgtaaaaatttaaatgggttagcatttaaaataagcaagtataaaaacaaatatgagaattattctgtatttatgatatgtcctgatccaccacaaattatacatcatgataattatagtgataataataattaccaattattgaacagatatgctctgccagccctattttatatattctaaaatttagccataaatactaccttcattttagaaattaagaaagacaccaggtacggtggctgacacctgtaatcccagtactttgagaggccaaggcaggtggatcacctgaggtcgggagttcgagaccagcctgaccaacatggagaaaccccgtctctactaaaaatacaaaattagctgggcatggtggcacatacctgtaatcccagtcactcgggaggctgaggcaagataattgcttgaactcgggaggcggagactgcagtgagtcgagatcacaccattgcacttcagcctgggcaacaagagcaaaactccctctggaaaaaaaaaaaaagaaaaaaagaaaaaaaaagaaataaatagattaagaaagacttaggctcagagatgttaagtaagtggcatacctggtatttaaactcgtggctatctgaccccaaaacacctactctaatgctatccctttagaggtgactgcctcattcttaaaatgtgctattttacatctaaaatgatgcatttcaattttatgataccattttacaccccctaagtgaattaatcactcacttctttataactctaccatccatgtgtccattcattcactcagcacatgcattaagcaccttctccttgtcagaccctgagccaggccttgtgatacagtggtgaataagacagtcaaggtctctgccttcatgcagcytaaattcaggtgcagaggcagataacaaagaactagaaaaaatgaaaacggcagattccaatttgtgctatggaagaaggaaatagaaattttaagataagactgggaggaactaatttagattagatgacctggcagagtctttctaagtactgtatatgacgttgtactgctgaattggggaggataagatttagtagctatgggaagagctgggtcagagagaccaacaagttcaagacccagagacaagaatgagtttgtcatatgctaggggcaggaagaggccagtgttgctataatatgagtaggtaatggcagactggtatacaatgaagttgaagaggtagacaagaagcagatcgtgattaggagtttgaatcttatccaaaggaattggaaataatttcctaatgatgtgctagaaccagttaccacctgtccatgggagccgattctaggcatctcttcccagctccatgttcagtgacatcacattggtagcttaaaatcagctatggtggtctttatctaggtggtggttacataactgtatgcatatgtaaaaattagttggactataaagcaaatatcagtacactttaccctatgctattataccacaaaaaaatatttttcaraaaaaagagagaggagcttacagtgaaaaattacataaagaagcaattcactattagtgagtcagtagtgacaaaaaccaggattagcaacacaaggactttaataaagcagcgatttgaaagagaatataaaataatagtgtttttaaaaaggcaagaaaggaaaatatgacagactatacctaaagagatgtggttacaaatttccaaatagaatgaaatcacaaattctcatattcaaatgtgcttcatgtttcattcaggatataatttggagattgctctaagaaagacctgatagtgaattgcatatgaagaatgatgcaaaatgagagctcaaggattacttctaggttctaattgacatgggaaaaaatgggaaagaaataggtttggaggagtgaactaagacctgtgttgtagttgtttaagatgcttattcgagcgccaagtgtaaaagtaaagcggcaattagaagaatctagagctcaaggtgtgcgcagtgaaaagaatttgggaattatcagaatacagatggtatttacagccatatttgtggatgagataccctgaggagaaaatgcagctagagacaaaaggacatagggctgagccaggtgacttcaaagtttccagactggatagagaaggagacctagcaaagaggaccaaggagggcctgtatgttgcatatttcatttctcagtgatgctgttagtatggtgtactaaaaagtaacctgtacaagaactcaatataacagaaacctagatcctgcttagttaaattataaaagtgctctgtgaacaatttttctatctgtaaaatgaaagtaatgactctttttcagtcaatttaataggatacacatgaggatccacagaatttatgaaagtaggtatgctttgtaatctaaagatgcagcggagtcatgtcctggcttttctatcagaatactcttagaggaccatgttgaaaatggctctattctaatttttttttatattctttaaagagtaatattaatatacttggtgaaccatcttgaggtcctggtacctactcttttctgttctagttggctaaaggacttgtcttactttaggtatatcatagaaaaagctggagggtgaataatcctaatcagaagaaattaattcaaagtcatgatgtctagggtctttctaattttgccgtcaacaaagcccatcaaaggtgaaagacacagggctttgccatagcacacagccagcctacctagccaaggcaaccctgttctcaaaattcagctcctagagttgatagagaaaactaatacttttgcttattatatacatttttctctgtttactattttagagtttctcaacagtaaataaaactcctataatagactagggatttctaatctgggtgaatattattasaaaaatatttttttcctagtgatggggaatgggggatggaaggatcatctccctgctttcatctaagatcctgaggactgaagtttctaaaaagtcttaatattccccgattatatactcaaaggtgtttttaacttggcactacatttaatccagtaaattttgaccaatttttaaaaatgtaattagagtccttaagtgatgtgctttcaccaagtggccaagcattgtataattcacagaaggaccattcctctgaaatgtatgctcttagtgagatgtgacttcacgaatgtaaaacagtgataatttacccttttttgtgtttctctctcgggccacatgctaattattatctctaagttacatttcatagtattcacaaaacacagttatgcattaagtacttctgtcacccaattatgaacgtgaagtttgtgagagccttgggaatttctcagactcttacatccagaaagtggtagatctgagattcaaacccatgcagtttgacctctcagccacgtacctgacctaagtaggagcttgtcttttaggcagctatagtagaactgtctgaaatgccattataggaccaataactagcatatgatggtttttctaaatacagagactactaaatttattttaagtaaagagggccaggcgcagtggctcatgcctgtaatctcagcactttgggagcccgaggtggccagatcacctgaggtcaggagttccagaccagcctgaccaagatggcgaaacctggtctctactaaaaatacaaaaattagctgggcacggtggtgcgcacctgtaatcccagctacttgggagggtgaggcaggagaatcacttcaacccgggagacggaggttgcggtgagccgagatggtgccactgcccttcagcctgggtgacagagtgagacaccatctcaattaaaaaaaaagaaaaaaaggaaaaagctctcttcattttaaatttagtagcaatttcaaggcttaaaaatactagtgaagcataaactctttgaagaaaacaatgtcttatccaaagaatgaactgacccacaagaagtacatactagaaaatgttttaaaactrgaggcacttgaacggaaatagcaccggacagggaaccatctcatgggaagttgagtcccaattctgacggtaaatttttttcttgactttgaacaaggctttttacttttttcaaatctatttctcatctatgagatagagtcagatatagcagttcctttgtgcaaagggcataatcattgtggaaaagatgttatagtggtaatattttgagctacttgagaacagtactcaatgaaggtaagacagtcatagtatataaaataatcaaagccataatcagaagagtctgtacacttatataccatagttctcagtaagattgactgtcctggtcatagtcatatttttttaagaaagggcagaactatccaattctaatagtgcattgaatcccatttctaaagtcacagtatgcccattttgtggcatatattctgcctactgctaatattcctttagacagatggagtagaactaatgtactggaacatggctttcatttattttcttaataacctttgccatgatcaacagtgaatcacatcaccaaaggaccagatctggattgtgaccttgatttcttgatttagagaagtaaaaaaaaaaatacacatttttcataaaatcaaggtgtagaagaaataagttaatataaatatgaaatgccaagtcccttgaaattcatttgaacttttaaaatatctctttatcaaatcaaagatcaactaaaaatctatagcttaaacaatgcagcattttaaaaaaatttttttctctctcgatcaaatacagttagttgccttggaaaataactgagctatcatttcaccaaaacatgtcaaaccaagatcgcactatttttatcaggaaaaatgaaagagtcaaaaactcatccaagggagagtaaaagttgtgcttgcatttacttataccaaaaagtaggatgtagagaatactctttgataaaattagtatatgataagctggaaaggccttcagataaaggaacaagaatttacaactgtaaaacatgttgtaagaatgaaaaaacagaatcacctattgtcagtggcactactaaaacacattttcaacaagcttaaatatttcaaacgcctatcgaggtcgtgtgtttgaagcaaattcatcgtgtttcatatggcatacttcatatacaaaagtaataagggaaatgttcaaaattcaaattcaaactatcagactttaaatataagtgtccaatgcccagtggtcagacctacaccatggagagaaatttgactgaggataaacatatccataaaattccacagtattttattccttccaaggcatgttttatcacactggattgttgaagttcttgttcataaaaaggagagaacttttctgccaagcaaattaatataattaaggaaaccaaatgtgtcagcctatgttgaaactacagcagagttgagtaaaaactacaaggaattccttccagaaggaaaaaatcataataatacaatgtggtagactgagaacaggtttttaactacactaacttgtagtcaaactactactctgcttcttgcttaccctgcaactcacctgaataaattactcactktcccygaaccttaggcatgaaatcagaatagcacttacctcagagactgctgtaagaatataatgaggaaatgactaacctggtagttttctctcttcacttatcctttagttccttgactctttctgatatttttattatattttattttatttatttttagagacaggggtgtcactagtctggtcacctacctagactggctctgaactcctgggcttaagcgatcctcctgcctcagcctcccaagtagctgggactatagatgccagccacacctggctttttctgaggtttttaaatctaattttttaaactatatttcataaataagagaaagatacaaacacacctctcatgacaaagtagtttaataatctggtagatctaagggagagactataaaagtagacattgttagagcagaatttcagagaacttccactaatattaacccaatgcttggctattacagaagagataactgtttacaaaggctgcccatgaccctttgatcagcaacatttatgaaaaagtcatccttatagatgtgaaaaatctatttccttataacttgcattcacacatcactgttcttccttctgaaggcattcatagatttgaagactattagatgcctgcattaagactattcactagcctaatattcctaaccactacaaaccttctgtcaagtgacataatttctcaaattttcatcattttgagccctctttaaaagatatattccaatatgttgaataatccttaaataaagctgaacatcatattccagcaatgtttttaccagcacagaatagtaataatgctaatattatgaacatttattgcatacttattatatgccctaaatatttgagatgcatatattttttagtgtagtaattttttcaaattttgtatttagtcatccagtaaaatgttagctggcacctacagtgaggcactatagaataacggttaaggattcagtcttcagagccacacttactggatttgaatgcagactactatttactagtctgtgacctgggggaaaataacttagactttctatgcctcagtttcttctattgcaaatgagattttaagatttgttttaatatcaagytatctatgtgaaacatttagaagagcgcctagtgcatagcaattgtcaggaatgttaatagttaccattattagtactgtagagaccaggtaaccatgtggaggaaatggacaactgaacaagaaataatataactcaacattgaaataagtactgtttaaaaataaagcatagaaggagacaggaagtgctaagctggaaggttttggggatggaggttagatatgtaggtgtaagaaggctgccatagggaggcagcatttgaaaaaacctgaatgaaataaaggagtgagccaaataactgcctagtgggacagtctgcccagaagagggaaaggctagcagaaaaggccctgaagtgagatgagcttggcagagatagtgatatttagggaaagcaagccatccagtgtggctagagaagaataagcaagttaggaggtgaatcagaaagttagcaggggccatatgatgtagtgtttcataggtaatggaaagaaagcacatagagataaaacctcttatctaagttgacagactgatacctattttctttgactctaaagcctgtaactcttaatcacattgctgcccttgacatgaacaatatattagattggtgcaaaagttattgtggtttttgccactgaaaataatggccaaaactgcaattgcttttgcaccaacctaaactttactcatattaaaattccatcagattttttggaagtcaagacacactgatggcttacattgtgcccttgtcagctgaaatatttaaatgtgttttttaatttttttattatgctttaagttttagggtacatatgcacaacgtgcaggtttgttacatatgtatgcatgtgccatgttggtgtgctgcacccattaactcttcatttaacattaggtatatctcctaatgctatccctcccccctcccccaccccacaacaggccccagtgtgtgatgttccccttcctgtgtccatgtgttctctttattcaattcccacctatgagtgagaacakgcggtgtttggttttttgtccttgtgatagtttgctgagaatgatggtttccagcttcatccatgtccctacaaaggacatgaactcatcattttttatggctgcatagtattccatggtgtatatgtgccacattttcttaatccagtctatcattgttggacattcgggttggtcacaagtctttgctattgtgaatcgtgctgcaataaacatacatgtgcctgtgtctttatagcagcatgttttataatcctttgggtatatacccagtaatgggatggctgggtcaaatggtatttctagttctagatccctgaagaatcgccacactgacttccacaatggttgaactagttgacagtcccaccaacagtgtaaaagtgttcctatttctccacatcctctccagcacctgttgtttcctgactttttagtggtcgccattctaactggtgtgagatgatatctcattgtggtttttatttgcatttctctgatggccagtgatgatgagcatttaattatactttaagttctagggtacatgtgcacaacgtgcaggtttgttacataggtatacatgtgccatgttggtttgcggcacccatcaactcttcatttactttaggtatttctcctaatgctacccctcccccagccccccaccccccaataggccccagtgtgtgatgttcccctccctgtgtccatgtgttctcattgttcaactcccatttatgagtgagaacatatggtgtttggttttctgtccttgtaatattttgctgagagtgatggtttccagcttcatatatgtccctgcaaaggacatgaactcatcctttttatggctgcatagtattccatggtgtacatgtgccacgttttctttatccagtctattattgatggacatttgggttggttccaagtctttgctattgtgaatagtgccgcaataaacatgygtgtgcatgtgtctttacggtagaatgatttataatccttagggtatatacccagtaatgggattcctgagtcaagtggtacttctagttctagatccttgaggaatcaccacactgtggacagtggttgaacgaatttgcactcccaccaacagtgtaaaagcactcctaattctccacatcctctccagcatctgtggtttcctgaccttttaaggattgccattctaactggtgagaggtggtatctcattgtggttttgatttggattaactgtgtttttttatgggaactcttgctaacttggttctaattcctcttgtatatctgtaactgattttggaagaggtttatacgtattatagttcatcttgctcaattattcctctcagctgtgtgtattctgataaacttgcctgctacattttcatttcaaatcctaataaaaagagtggactagaatagaggataaaatagtttgttctgactgctacaaatacctgcaggcttgcatgagttcattaaattatctctaagatacacttgtacaacaagttatgaacctacttttaacttttaaaagttaatccacaagtttattaaggaagatttgtctaaggttctatataattcacattaatttctaacctagtacatttatgagaaaaagaaaatcggaaattagtttagcatatatttatcaaacacaggaagactactaatttttactatctatgtttctaagatgttaatcttcttaatcatgtgtcctaattttttgccatggatattatacttactcaactgtagattatagttattatctgtttgaaaaatgaatcaacatttatctatcttatgacttatggagcccatactaattaatacaaattcctgaaatattactgacagtgattctgtgactttatctctaaacaaaatgtgtttggacctaagatatcaactctgttacrgtagtgagattcagtctcactatctctctagtaccttgaaaccattttggtctactattagtatgttgaagaaaattaccactatgaatggataatatatacaaaaaataaaaaggaattggaactttacccaattactttttcttttcatcatgacatcatctgccataaactgagcctcatccctctttgttctcttgactgcaaacctggttataaaagcctttttttctttagcttttatcccaattctcattacactttggatttaaccctcttgatactattcgtagaagcttgaatcttcttttccctctgtccttaattaaattgtccatttatctcttttttctgcacataaatttttttatttttttaaatttttggttacagatatataataaatgtacatgtttatggggtacttgtgatattctgacacaagatataatgtgtaatgatgaaatcagggcaattggtgaagccatcacctcaagcatttatcatttctttggtacaaacagacacacatacatattttccaaattagagataggagtctcactctgacacccaggctggagtgcagtgatgcaatcctagcttactctaacctcaawctcctgagcccaagcaatcctcctgcctcagcctcagttatgactgcaggtatatgaccccatggctggtgagttaggccattcttacattaccagaaagaaatacctgagacgggaggtggctggcaagatggctgaataggaacagctctggtcttcagctcccagcaaaatcaatgcagaaggcgggtgacttctgcatttccaactgaggtactyggctcatatcattgggactggttagacagtgggtctagcgtacagagtgcaagctgaagcagggttgggcatcacctcacccaggaaacacaagagatcggagaactccctcacctagccaagggaagctttgagggactgtgccataaagaacggtgcactgtggcccagatactatgcttttcccacggtcttcgcaacctgcagaccaggagattccctcgggtgcctacaccaccagggccctgggtttcaagcacaaaactgggtggccacttgggcagataccaagctagcttcaggacttttttttcataccccagtggcaactggaatgccagcgagacagaacctttccatcccctggaaagggggctgaagccagggagccaagtggtctagctcagtggatcccactcccatggagcccagcaagctgagatccactggcttgaaattcttgctgccagcacagaagtctcaagtcgacctgggatgctcgagcttggtgcggggargggagtctgccattactgaggcttgagtagggggttttcccctcacagtgtaaacaaagcttcctggaagttcgaactgggcggagcccaccacagctcctcaaaggtgctatagccagactgcctctccagattcctcctcttgggcagggcatctgaaagaaaggcagcaaccccagtcaggggcttatagataaaactcccatctccctgggacagagcacctgggggaaggggcggctgtgaagtcagcttcagcagacgtaaatgttcctgcctgctggctctgaagacagcaacagatctcccagcacagcgctcgagctctgctaagggacagacttcctcctcaagtgggtccctgacccttgtgcctcctgcctgggagacacctcccagcagggattgacagacacctcgtataggagcactccacctggcatctggcaggtgtccctctgggacaaagcttccagaggaaggaacaggcagcagtctttgctgttctgcagcctccactggtgatacccaggcaaacggagtctggagtggacctccagcaaactccagcagacctgcagcagaagggcctgactgttagaaggaaaactaacaaacagaaaagaatagcatcaacatcaacaaaaaggatgtccacacaaaatccccatctgaaggtcaccagcatcaaagaccaaaggtagttaagtccactaagatgaggaaaaaccagcatgaaaaggctgaaaatttcaaaaaccagaatgcctcttctcctccaaaggatcacaactcctcgccagcaagggaacaaaactagatggagaatgagtctgacaaattgatagaagtaggcttcagaaagtgggtaataaattcacctgagctgaaggaacatgttctaacccaatgcaaggaaactaagaacgttgagtaaacgttagaggaattgctaaccagaataaccagtttagagaagaacataaattacctgatggagctgcaaaacacatcatgaaaactttgtgcagcatacacaagtatcaatagctgaatcaatcaaacagaagaaaagatatcagagattgaagatcaacttaatgaaataagtgtgaagacaagattagagaaaaaaggaataaaaaggaagcctccaagaaatatgggactatgtgaaaagaccaaacctacgtttgactggtgtacctcaatgtgacagggagaatggaaccaagttgaaaaacactctttaggatattatccagaacttccccaacctagcaagagaggcyaacattcaaattcaggaaatatagagaacaccacaatgatacgcctcgagaaaaacaaccccaagacacatactcatgagatccaccaaggtagaaggacaaactgttaagggcagccagagagaaaggttgggttacccacaaagggaagcccatcagactaacagcagatctctctgcagaaatcctaccagccagaagagagtgggggccaatatttaacattgttaaagaaaagaatttcaacccagaacttcatatccagccaaactaagcttcatcagcgaagaagaaataaaattttttacagacaagcaaatgctgagggattttgtcacagccaggcctgccttacaagagctcctgaaggaagcactacatatggagaggaaaaaacggtaccagccactgcaaaaacataccaaattgtaaagaccatcgacactatgaagaaactgcatcaactaacaggcaaagtaaccagctagcatcataatgacagggtcaaattcacacataacaatattaaccttaaatgtaaatgggctaaatgccccaattaaaagacacagcctggcaaattggatagagtcaagacccatcagtgtgctgtattcaggagacccgtctcccatgcagacacacataggctcaaaataaagggatggaggaatatttaccaagcaaatggaaagaaaaagaaagcaggggttgcagccctggtctctgatattaagagactttaaaccaacaaagatcaaaaaagacaaagaaaggcattacataatggtaaaggaatcaatgcaacaagaagagctaactatcctacatatatatgcacccaatacaggagcacctagattcataaagcaagttcttagagactacaaagagacttagactcccacacaataatattgggagactttaacaccccactgtcagtattagacacatcaacaggacagaaagttaacaaggatatttaggacttgaagtcagttctggaccaagcagacctaatagtcatctacagaactttccaccccaaatcaacagaacatacattcttcycagcaccacatcacacttattctaaaattgaccayataattggaagtaaaacactcctcagcaaatgcaaaagaatggaaatcataacaaacagtctctcagacaacagtgcaatcaaattagaactcaggattaagaaactcactcaaaactacacaactacatggaaattgaacaacctgctcctgaataactactgggtaaataatgaaattaaggcagagataaataagttctttgacatcaataagaaaaattcataatgtaccagaatacgtaggacacagctaaagcagtgtttagagggaaatttatagcactaaatgcccacaggagaaagcagcaaagatctaaaatcgacgccctaacaatgaaattaaaagaactagagaggcaagagcaaacaaattcaaaagctagcagagggcaagaaataactaagatcagagcacaactgaaggagaaagagacacgaaaaacccttcaaaaatcaatgartccaggagatggttttttgaaaagatgaacaaaatagatagactactagccagactaataaagaaaaaaagagagaagaatcaaatagacacaataaaaaatgataaaggggatatcaccactgatcccacagaaatacaaactaccatcagagaatactatgcacacctctatgcaaataaactagaaaatctagaataaatggataaattcctggacatacaccctcccaagactaaatcaggaagaagtcaaatccctgaataggccaatagtaagttctgaaattgaggcagttattaatggcctaccaaccgaaaaatgcccagaaccagaaagactcatagccgaattctaccagaggtacaaagaggagctggtaccattctttctgaaactattccaaacaatagaaaacgagggaatcctccctgactcattttatgaggccagcatcatcctgaaaccaaaacctggcagaaacacaacaaaaaaaagaaaatttcagaccaatatcctaatgaacatcaatgtgaaaatcctcaataaaatactggtaaaatgaatccagcagcacatcaaaaagcttattcaccatgatcaagtcagcttcatccctggattgcaaagctggttcagcatatgcaaatcaatagacgtaatccatcacataaacagaaccaatgacaaaaactacatgataatctcaatagatgcagaaaaggcctttgacaaaattcaacaccccttcatgctaaaaactctcaataaactaggtattgatggaatgcatctcaaaatagtaagaactatttatgaccaacccataaaaccatatgaccaacccataaaacctaggcaatagcattcaggacataggcatgtgcaaagacttcatgactaaaacaccaaaagcaatggcaacagaagccaaaattgacaaatatgatctaattaaactaaagagcttctgtacagcaaaataaactatcatcagagtgaacaggcaacctacagaatgggagaaaatttttgcaatctatccatctgacaaaaggctaatatacagaatctacaaggagtttaaacaaatttacaggaaaaaaccccatcaaaaagtaggtaaaggatatgaacagacacttctcaaaagaagacatttatgtggacaacaaaaatatgaaaaaaagctcatcatcgttggtcattggagaaatgcaaatcaaaaccacaatgagataccatctcatgctagttagaatggcaatcattaaaaagtcaggaaacaacagatgcgggagaggatgtggaaaaataggaacacttttacactgttggtgggagtgtaaattcgttcaaccattgtggaagacagtgtagtgattcctcaaggatctagagccagaaataccatttgacccagccatcccattactgggtatatacccaaagtattatgaatcattctactataaagacacatgcacaagtatgtttattgcagcactattcacagtagcaatgacttggaaccaacccaaatgcgcatcaattatagactagataaagaaaatgtggcacatatgcaccatggaatacaatgcagccataaaaaaggatgagttcatatctttgcagggacatagatgaagctggaaaccatcattctcagcaaactaacacaggaacagaaaaccaaacaccacatgttctcactcataagtgggagctgagcaatgaaaacacatggacacagggaggggaacatcacacactggggcctgtcagaaggtggggggctaggggatggatagcattaggagaactatctaatgcagatgatgggttgatgggtgcagcaaaccgccatggcaagtgtgtacctacgtaacaaacctgcatgttytacgcatgtattccagaacttaaagtaaaaaaaaaaaaaaaaaaaaaaaaaaaaaaacagaaagaaatacctaagactgagtgatttataaaggaaagaggtttaattggctcatggttctgcaggctatacaaacatggcactcacaactgcttatcttctggggagcttcagggagcttttactcgtggtagaaggagaagagaaagcaggcacatcacatggtggaagctggagcaagtgtggcggggagctgccacacacttttaaacaaccagatctcatgtgaactcactcatcaccaagaggatggtgctagctaagccattcatgagggaaaagcccatgatccaaacacctccgaccaggccccaccttaaacactggggataatattttattgtgatttggtgggacacagatccaaaccctagcacctggctaatgtttttatttttatttatgtagagacaggattttgctgggtttcccaggctggtctcagattcctggcctcaagcagtcctcccaacttggcctcccaaagtactgagattacaggcatgagccatagggatgcctagcctacctatatattttatacagacatcatggatcattctatgcaataaaattgttttctttagatattttacccacggtttctatttttaatttcaatgcttttgtgtttgtattttagcaataaatatttttatttaatatttatttgataaatatttatatttaatatttatttgataaatatttatttctcttgagtgagcttccttcatatggttatgaccttacatttatacttaggttttctctgagcatttaaatatatcctttttggtgtttattttttaaatgatatgatgtttgagatttacttcaaaataacctgcaacaggcagtagggggagtcagataatggaatggacaaaataatattggttatcggttgctgattgttggagatgagtataatgagtgcatgctagctcattatattgctttctccatttatacgtaagtttgaaattttcctcaatgaaaaattaaaaataaaagagattgtatgttagtaccagctttttagagagtactaacagagccctaataatgcacaccaccaatttttcttaaattgtgtttatcataattttaaaagcttttaattctcagggtagttttaggtttacrgcaaaattgaaaggaaggtatagagattttccrtataccatttgcccctaaacatgtatagcctcccttattattaacatcccccatcaaaatggtatatttgtcgtaattaatgcatctacaatggcacatcattatcgyccaaagtccacagttcatgttagggttcactcttggtgttgtacattctgactttggacaaatatatgacatgtatccactgttatactaccatacagaattgtttcactgctctaaaaatcctctgcacttcacctacttactccctatcccctaaaccctggcaaccactgatcttattactgcttccatacttttgtctttcccagaatatcatgcaattagagtcacagaatttagcctcttgggattggcttctttcacttagtaatatgcatctaagtttcctccatgtcttttcataacttgatagctcattttttaagctctgaataatgttccattatctggatgtacaacagtttatttatctattagcctactgaagtacatcttggttgcttccaagttttggaaattatgaataaagctggtataaacattcatgtgcaagcttttgtacagacacgagttttcaactcctctgggtaaacaccaaggagtgcaattgctgaatcatatggtaacaatatgtttagtaagacaccaccaaactgtcttccaacataattgtactattttgcatttccaccagccatgaatgagtgtctagtgctttaaattctcatcagcatttggttttgtcagagtttttttttttattttggccattctaatagtgtgtagtgatagctcattattgttttaatttgcatttccctgatgatatacgatgtggagcatcatataataataataagatgtcatatgcctacttaccatctatatatcttttttggtgaggtatctggtaaggtctttggcccatttttttaatcaggtcattaattttcttagcattgaattttaagttctttctatattttggataacagtctttatcagatgtgtcttttgcaaatatttttccaaggctgtggcttacatttttatccccttgaaagtgtcttttatagagcagaagcttttaattttaatgaagtccagtttatcaattttttggattatgcctttggtagcatatctaaaaagtcatggcaaaagccaaggtcatctagattttctcctatgtcatcttctaggacttttatagtgtgtgttttgcatttaggtctgtgatccattatgagttaaattttgtgaagggagcaaggttactacctagatttctttttttctctgtgcatgtccagctgttctagcaccatttgttgaaaagactatcttttctctattgtattgcctttgctcctttgtcaaagatcaaattactatatttatgtgagtctatatctgggctctctattctgttctattgatctctctgtgcrttcttttgccagtaccacacttcctagattgctgtagctttatggtaagtcttaaagtcaaattgtatcctatggtagctttattgtaagccttcaagtcaggtaatgtcagttttccaactttattcttcttcagtattgtgcaggatagttttatagcagtgaaaaatgcaaataatgtaaatgtccaaccatttgttcatgactagtgaaataaaatttggtggttatgatgaaatacactgaattattaaaaacaaactgtcagtcttaggtaagtaaatgcaagtttctaaatctatattttaaaaagcaccatttatatccctatctgtctaaacatctgttgagttttttaaaacgtcattgtttccatttataatatcctttatattttcttagctctctaaatggtgtatatcttgttgacctgaaccactggtcccctcacttaaacatgtttctttctgttgaacgtattgtagcaattcattttctcattttggtcatgagttgtgactattgtcttttatgaaagtaaacattcagtcctaaggacaaactaaataagcttatcttttctgaatgtatcgtatagatttgtaccaaaaataaaattggcccaaaagccccactgttgaagatatgtatcatgtaactttatttcttaaagattgtattagagttccaagaaaaagcctacaatttattataaattaaatgaagcataacaatagtgtgttttttaaaaaaatctcattcccacaaagcaaagtcagatctaaaaggaaaagtggccatgaagttctctgtaggcttgttttattttatcttttcagtgccttggtacatagattagcttaaacatttgaagaaatatgtgccatgaagaaaagtttttgttggattctatgaatacatttttatttatcagatttagtttgctcacatttactatttattgtagtgtttcttatgctatcaacaaacatagctaaatgttactacattttaatagagtaacactgatttcaaatctgtaaattaaataatgaaaaaaataaatgagaagaaaaagatgttaatattaattgaggaaaattttctgaggtctgctattgaccaagaaaataaattatatgtaaaattttacagtggaaaataaatatatagaaacttggcctcctcagtactatcctttcagaaattaataaaaaaggtagaagatattattaagtcagataaatgccagagaaagggctttttaaaaatctataagtttgaaactgtttcatagaaatatgtcaaagtctgaacttccctgacttgattttgcgtgattggcattcttcaagggacaaagggagttttctggtgcaatctgcctaatggatgtccttttatttatttatttatttattttgtttcattttcctttcctatttctcagatgttcttagcttgaaaggtttattccataggttcagtggtcttctttagaccagaaagaacttaggtaagacatgaagttaaggtcgcactgagtgcactttccagtagtcaacttagatatttgtcaaaagtagtatgacatttggcaaggtaattgacagtagcactgactttattctcttaacatgttgacagcacacaaaagctcaaaatctgctttttaataagtggatggtacccctaggctaaagaataatgagtgtacattttggggcatcttctctttatttaacctgccatgctgtactttatgtattagaagtagacaccacagttgtctggtttgaaaatactggtcttataagtcagtatccctctgcataacagagatgagctagcttttgccaaaaataaaagcagggagagaaagataaagaagggtttgtgaaattcatacagtagaatttcaggaaaatacagcaccatattacaaatatacgtcactgtttactcaatttatatctgaaataatttgtaactactcacctgataatagattttagcatcccacaaaaatacttgtcaaataaatattctacattttcaattagaatgagaaaacacttattaaatgcattttacaaaaagaaatattatatggcttttgaaataaagaggaaatcttaatataaaacatatctagttgcaattgaactgtcaaattagcttaattatagaactttatataaatatttccttactaaaagattttatttcataaatgatctcttaaaagtataacaatagcaataaagattataaatacctttaagaagtgagtcattcattttaaaaatctaccacaggtaataaaatattatgaaacttaatacaccacacacatgagattaccagtaaaactgagaaaatctgaataacattggtggatttcattcatatcaatatcttgattgtgaatattgccctatggttttgcaaaatgtcaccattggagaaactaggcaaagtgtacaaggtgcctttcttaccactgcaaatgaatctacaattatctataaaagtttcaataaaaaaaggaaaaaccctacatttttatggacagaagtttaaattttcaggcaggagaatataatcaatcttatttctgttgcacgaaaaaacctattgtattaaaaaataaaagaaaatacattctaaatgcaaacataatttaagaacgaatcaatctctaataaagtcaatagagaaatgcaatgagtaagcaaattattccataaaaagtatggttcacatgcagaaaagaagaaaaatctttttaagcaaatagttattccttctttaaatcctagcatacgtctaacctctttcttcattctcattctccaggtttaaatctaagctttcttcgcatttagagtctaaaaattcttaggaatcagtttatctctgaagagttatatatagcatcaaggaaaagatacagtttcacacaatcacgcacatgcacattatcttgccctttttagaactgatagtataatttagaggcactatattagagtatgaaaactttggtggcttaacccaacaaaggtttatttgacactcatctgaaagttcaatgcagtggtgggggatttgctccacacagtcattcagggaacaaggattttttctgcgggtgatttatcatttttctaagacgtcaatgtcctctaccatatttctacacctgactggcacaagcgaagaacccaaacacccattatttagagaatggaaaagcaaattgtgrcactatcaggatacaggatactactcaacaatgaaaagaaacaaatgattgatgcacgcaatgtgcagtattgtggattaaactaagtgcaagaagcccagactcaaaaggttacaaactctataattttatttatatagggcattctagagaaaataaaaccaaagggacaaatgagtagttgccaagactaggagctggggaagggattgactgcaaggagatgaggggatttttgaaggttttagagatgtgtatattttgattatggtcatgattatatgattatatacacttttcaaaactcatcaagttgaggctgggagcagtggctcatgcctgcctgtaatcccaacactttgcaaggctgaggcgggtggattgcttgaggccaggagtttgagaccagcctgggcaaaatggcaaaaccctgtctctactaaaaattcaaaaattagccgggcatagtggtgcgcagctataatcctagctacttgggaggctgaggtatgagaatcgcctgaacccaggagatgggggttgcagtgagccaagcttgcccctctgccctccagcctgagtgacagtgccagactgtctcaaaaacaaacaaacaaatgtcaaaaaaaaaactcatcaagttgtgtgattacaaagaatgaatttttttatatatgcattatatattaacacacctgactctttaaaagtttaatrcatgctttatactttttatctcaactttcaaggttagaccaggagaaacatattttttaaatgtctgcaaaagtatcctcccttctgtgccactgtaaggggtggtcagcagagcagcagcagcagcagctctgggagctatttagaaacactcttttgcccccttctccaccttccctttgcagaccttttgaatcaggatgtctagttgtggagcctaggaatctgtgtgctaacaagctccttgggtcatgccaaagttttaaaagcaatgatggtttataagaaaatacaaatcatgattatttttccagcaataaacatatacttcacttatagtaaatttaaatctgatatggttatttccccccacattcctatttacaataccattttcattttcacattgtaacattctactgtcatgttaactaccttttaaacaatttaagttgtaatttgagcttgtgctatattaccaatgcattagtaacactcgtacaaatcaaagcaaggaagtttccaacttctctgccaaaggattgagaaaggcgtcttctgatcttagattaattttacaaatactaaaattttaaaaataaaatgttaactggtcttagatttgtgaacatgaaggcatatctcttaaaatttccttatctaggttaagatgaaataattaccaactctgaagaaaaggctaaaataagacagataatgtaagatatatgtgtgttgtgttgggaaataaaaggcacaaatttaacagacatattttcacttgcgttgtgccagacttgctcagaacattaatgtaagctttgcccatggcttgctgagtggtccattctcctcttgagacttagagaatggaacagtaaccttgtgaccagggtcactgccatgctcccagccttgttgatggattttagaggcagcctaaactaattccatgaacagtgaaaatgcatttggatttaaatgttttataggctgtctgtcacttaccttctggaagttagcttttactctgcttcattaaaccaacttacagtattcacaacagactggcattcacagaaacgaagtcatacacttatgaaatcctttatttattcaagtagcttggagaattacaaagagtatgagcctaaaagtcagtcagacacaaatagatacaatctcagctctgccctatctgtgtgtattgggacaacatacctaacctcctccaggttctgtttcctcacctataaggtaggaattagaatagccttgcaagcatggtcattgtgaaaattgactgagataataggataattattattttttattgtttaatgaacatatcttaagagtcttatctgcttcaggcactgtattccctaggaaaaggaaggcacacaattaaaataagacatgattttccccctgaggagttccatggttctcaaagtggttggtaatccccttctagggattcctaaaactgtgtggagatattattggatgttacaaagactggaggtgctattgatacttcatgttcatggattctaaagattctaaaatgcatgggacagcctgagcaacagcaaaataattatcctacccaaaatgccaatagcaccccaattgagaaacaccgtagtagaggaagctgaaatgaatcgactataataatggatagaaaacaaaacaaatttcataatagatagatgcagtaagcacatcattaacaacatcataaccatcattgtaataagacaatagtcctttacaagacagtttgcatcatttcatttaatcctttgcaacaaaccatcagggagtgcactatatatctgtgcttcacaattttcatgtgtgtaagaaccaaatggggatcttgttaaaatgaagcatctgattcaataactgtactttaaacaactcatcagggggccacactgagttggcatgttatgtataatcgtagggaacactgttggtattgtggccaaaccccctgagacacctgttaccatttttgtgctttctgcgcccacctcaaccctgcgcaagatttacttccracacctgtacctgtgattcccctgggcaggcactgtggctactggagctgctttgccaaaatccgatataaagttgtaaatgcctggaagtttagatctctctagggagaacttgagttaatgactagctggtatgagagtatgaaacctcaattcctttgccaaatcaggacaaactctgaggcatcacttatccagagtcccctgcagaatttagttcaagctactgtcttctggactatgcctaaaatcatacctttacttgcccttctatttccctgccctcctttcattactcccaccacagtttcctgtgggaacacttactcaataaatcactcgtatataaaacattatcttagtttctgcttctggagaagcctactctaatacatcctcaatttctctcttttcctcaactcacgcatccttttggttcaccttccaaattacatcccaaatccacccatttatcaccaaatccagtgctacactcaggtcaaagcttccataattttacctggactcatgcaattgccttttgacaaccccaatccattttctgcattttcctgagggatcgtttgaaaagtaaatgatattatgtcacttttatgcttcaaatattaccactacttccttttgctcttagaataaactccagacatcttactatatctacagttgtttacattctcaggtccctacctccgtctttactgacatctgctaacaaatcctagctttgcccattttccttcagccgcactggtctttgttttttcttccatgtgtatttcacctcaaagacactgtgattctgactgtgctgttctctcagattttctcatcattcatctcagttcaaatgttactttaaaaaaagaaacctacctgactacccgatctaacatagaatcccatatcctccaacactttccatcataaattactgcagttattttcttcacaatatttgttattatgtcacattaacttgtttgcttttgtttgttactgcttacttattgacatgctctcaatgttattagaatatgttaataaattcttgagaccagggaccttgtgaaatgtatcatcaatgtctatagtaccytgatcataacagaagcttcattaatattttttaaataaatgaaatataagtgattctcatttaagagatgacaaaaataaggctttatatattacttgtccacagtcacacaaggtcactcagtagccagtggtggagctgggactcagctgagctcttggtcatgtgttatacttttcccctgtttctggagtttgttctgctcaagaactctgatcaaattcagcctcattcagcctcactgttgactcacagactttcccttagtatttacaccacataatgctagaatggaacttcttaggttgatattgaggaaggagaaaaataggaaagctaagtaagataagtggaggaagatagaaaaaagtggtggagacaataagttggttaaggggctgtcggggaaaataactactctagaggatagcaatcatttattttaaaaagctttattaagtgatgcaaatgattctgctatgggtaatgagataaacacccagcaagcctaaagcttgctaattaccctgatctaatcacttacattatgtacatttcagaacatcactgcgtactctatgaactccatgaatatgtacaattgttatttgtcagctaagaactacattaaaaataaagcaataaagtatatgttgaaaaaattaattataatacaaagaaaattacagactaaggttactatgttacataaaatttataattatagacatcttatggatttagtttgatagtctagctgtagatggctgggcatcaggtaaattggccctgaattcctctcattgcctcttcatatggatttacaaaatggtaaatggaggcataaaatccctaaagaaaactacttccctctccttctgcctttctttcattcatccatttattcatccctgttcattcatttaacagctatttataaaacatagagagcgagcaagagggtgagagagaatattattttgtctgggatgtcaagataagtttctttgaagaagtttaaactgagctctgaaagaagactaggaattaattattgctactacttagtgtatctctagtatgctaaatagaaatcaaatagagaaggaatgttttgggcagatggcaggggtgaaggtcctaaaaatgtagggctcatgaaacataccttctttctctgtttcatcttgaaatctcatctctaacaataaatacaagtaactttcttgaggttatttttccccagaagtatgtggaagaaatgcatataatgtatatagtatatataattgtgcatattattacataaattatgtaagtatgtattatatctaacatatctgtagagacagttgtggatgattgccattgaaagctaactttcatttgagtagtgcagtttcacattaaactgaacttgggcatgaatttcagaaagagtatagaaagggttaggccctttttaggcccaacctaaaattttaaagcctttaattgaaaaatttatgacagtttcaggttagtcatttagactaataaagtttagcaacatcacatcatctgtaataaattgttgcttatcataaacctattagggaagaaaagtttaagtcaagaaaatgtatatataaaagtaatgcttattttatgggaaaagtaatgcatagtaatgcatagctcaacatggaaaggtatgaaatgaaaagtaagaggaatgactcagtgtgttacagaaaagggaagataagtttgtgataatatggaggcagaaccgaagtttcagaaacagaggctaagaattttactccccagctctgttaaccttctagatcactggcaaatggaaaaaaggatagtggatggatcaggcttaatcgcagaaaaggtttcatgatatttggatacagaaaggttttttaaagctaattttaaatgaattaaacatcagaagcaaatgagaaactgatggttgctggttggccttcctctgaggtaaaaggtcaagtgattgcttgaaagatcatctaacttggcctatgaaatggaatgtgttcattttattcagaacttattcatgtgtcaaactttagaggattgtataaagacatcggcaaaactcttgaactatctgatacgtctatttcatataaaatgcaaaaaattttgtaattcaccctttcaaagaaccataatcatttagaaggcagtatgagaagcatttcatttagcctatcaaggtgacctaagatagttagtttagatgtgtaagcatatgctctagtattttgcacgatatgctttgagttccattatgagcatttcaggtagaaattcatttttcaatcattttcttctctttttagacacatatataatttaatataattttagagacctcattatattataattttgtcctctcttctccactttttaaatgttacatctttcctatttgattacagtatattaaaataataatgagcttgtcagtcttatgattgacatatatagaatgtcttattttagctaggtcgaaaaaatgaaacaattctaataaaatatgtatggtaaatatgatagatagacttattgcagcaaaggaaacttgaaaatagaatttatttattcattacctgtgtttccatggctacatctcaggcacacgaccacacccacagtagcatttatacccattcatatcacccctttcctggtcagaatatggagagaggggttgccatattgggtcctaagatacagcaacctgcagcacatgcttttactaaattgcagcctctcacttattttctcaggtctgtattattgtacatattttaaagaagtgtgagtcctaaggcaaaatttaactgcgaaatatataagtagtacatcatttccccctagaatgtaagctccaccagggcccagatctttatcagttttgttccctgaagtatatcatgtacctagatcagtgcttagcacctcgtggaatacacaggagagagacagagagaaagagagaatatataaattacatatcaggctgacctgctattccaaggcaggaatgtgttcagttaactttgagtttttattgttctttgctacctgtcagactttgcacatatcccattatctttcatcactaggcccctattgtacaactcttttaaagtatcttgagtaagattagaattttgaggtaccttttcttatttccctrctatttaaaacaagagacagaaaactagcastaatggagtgtccatcatgtgtctggcacagtgctatacatgttaatgtatatcatctttttaaacaaagaagactgaaattggtctaatgcaacatgactgtatgctgcctttatcttcatcagggtgctttcaataatttggacagctgcaaatgagattgctactggatagctgtgaatcaatttaataatgcagattaacttgaaacatgagagagacatctatgggattttttctgccagatcctccttagtaaagcatggactatctattaatattgctgctgctggactttttaattctatgaagtatatccagatccccctttacataatttttaaggactatggtgctaacattttagtatatctctagtatgctaattgggaatcatagatatccttcttaataaaatcatgttcttttgggagctttgcaaccttcatgtaaccctggaccactgcaaatagagttccacatgtagataaaacattgttgaaataatttatgagttggaacctaatacaaatggattcaaattccaactccacaacttattagctaaacttagattcctgagacttagtttatttgtaaaacaggaaattatttcagcactgttgtaagaattagagaaatcatgggcaataattgaagggtagatactcaataaggatgctataatcattgatagagggtagagataggaaatagtaatattttacctttacatttgtattttccatttcaacatatgttcagaataaaggtttgggattgtgacttaaaatcacagtccctattcaatgcccatctttcctccaaggcacaaattgaattgtacttcctccagctatgcctatctcacattgatctcttccagtatcatttatctttcctgtagtgaaaattgcttgcaaacacatgccagaaagcctgtgttaaatatgaaatttttgcttccttcattatatgactttgggcaagtcagtttacatttccaaggttcaatttccatcttattaaaatggctgtggaattgtactgaatattgtattagtctgttttcatactactgataaagacacccaagactgggcaattgacaaaagaaagaggtttaattggacttacagttccatgtggctgcagaaggctcacaatcatggcagaaggcaaggagaagcaactcatgtcttacctggttggcagcaggcagagagagagagcttgtgcaggggaactcctctttttaaaaccttcagatctygtgagacttattcactatcacaagaacaacacaggaaagacttgcctccatgattcaattacctcccaccaggtccctcccacaacatgtgggaattcgagataagattttggtggggacacagccaaaccatatcaaatattaagtaagataacgaataaaagatattcaaaaactttatagtgctttataagttgtctcagttatctgtggctgtgtaataaatcacaaaaagttggtgagctaacacaataagggttatttctcaactctataaagtctaggatcagctgggtagctcttctgctcaaaatggtgtccaaggatggcttcttcactcactcgtctggtgccttaactgacctggctagaataactgattctagctgggcatctctattaccatatgttttctctggcagcatagccagaacattttacatagtggttcagggatcttaggagagcctattccaagagaaactcaagtcttaccttgtattatgcttgttaatgttttattggccagagcaaatcacaggacttatcccacagccaatgtgtgaggtgacaacacagtcacatggatcccaggaggtgtagttcatttggggccaccaatgtaacagtctacacacaaatgtaagcagtaattgacattcccatttcatttctattactttgctataccacatattttggcatttgttttgcctccatagtcttcttcattggttcaygtgtgtactccttgtttcaagatgataaattttctagtggcaaggactctgttctaacatcatgttaccttgattctaacatcaaagctaatatttaatgatatattggaatatgtaggctttgatggttttgtagaagccgaatccttcccatatctgccacttaacagccattgtggccctgagcaagtatttgacctctttgagcctcagttttcccatttgcaaaatgaggataataatggtttcttccttcacatgattgttataaaaattaaattagttaataatatgagaaaagaatagtgcwggtccagaataaattttaaatgttagtgttatattttactgatataaagatagcctgatgtacttgtttaatttgtatctgatctctcatccatgggccccagtttaatacttcataaaggaatagatttcttgagtaattcacacagaaatattttacagcctcaaaatttggagtatttatatataaaataaattctatattttagcactgcattctcacaagttagtgaaggccttgatatttttgggcattggtgtttttaattctaaaaggaggaaactattctggttgtattcctaacctttttgagtttgggcagtcttatttggtaatctgagttaaatacattttaaaatagttatgctaagatattttaattgagaagcttgtgatatttattgaaacttctatatagaattcacttacctgtaacatcctatgatataaggatattttggtattgcttacatgtgaaaatgttaaagtggatataggcactcaatgatagtcaagttatccctgccactatgctaccctttagaatttaagacctccttttgagcaaggaatgtttctggcagcatcaatagcaatcaattttctactcacattctctcttttccacccagtgaattttactgccttatgggcagcaacagttgtaccctctgattgactccactactctcctcttcacatccaaaaacaaaatccgctgacaaaatagctttgctttgggaagagattgaagggattagaccacaaaatgctactttttgggggtcaggacaagtagaagttgaaatagtcaatatatttattttgcaaacactattttaattaacttttggtcattttaacaataacttcatagatatttaaaaacctgataagtatcactttgcttttttgcattagaagctattaaattatctatatatttttcaaatatagagaatattgcccacatgaagtacatattgcccatatgtagttcacaacacttttttgacgttttagtgagtctgtgttgctggttcttcgatacgtgtgcatttccttttattttttttctcttgatccaagaattttctttaaagagatatgctttccrgaagaaaaggaacataaaagtacatatgtgttttagtgttcagagtatattcaggtgattcatattggttgggaggggcaggagatcaggtaaaaaagggtgaagaaaagaaagaggacacagttttcctggaaatggaaggatgaaaaagaaaaatgcttgaacaaatattgtttctgttttctcattgatccaggaaaaatagtttagaagtatattcaaattgcctaggtccatgtttttaatataacaggaaaattatacaaatcaaaaaatcatctgcctttccccaaaaatgtgtgtttttttacccatttggtttaatatagacaaagagtctgccatttcttccttaattaagcatgtattaagtgtttacactcaagcgtcatacaaagccctcaaatatcttaaagcccagtgtggcagacagaaatatgaaggaataaggtcaaagtacaattatggatttcctaataaatgtctgtgctttgtaagaggagggggtgggcatcagggagttgtcatggaaacatttatagaagagaaaacacttttaaatgcaaaggcagccactaaaaaaccacagtgattgaaggacccttctaattcaaaaatataaaaaataaaagggaaagtgtaagtaaacaaaagaagaaacaagatgataattttccccaaattcagtcaagatttaggatatgaagaaagagtattgaaaatacattgtcatgcatgtattaaattctgtttgaaattctatcagtaaatgtttgccaattttttggaggaaaagattacatattttggtgcatatttattcatggaacaaatgctatgtgccagaccacaggagttactgggaacaaaatggtagggataaaactagtccttgccttcatggagctgaaagtgaacatgaaccaaatgtttccctcaagtcttctgtactcccctttacaaagtgaaatggcacaggcctgaagtgttctgtgctttataaagcgtgcaagtagttttgtcagctttctggaaaaggcctaatattattaggaagcaaatttgcatttaatatctacttaactcaggtcatattgttttctgttttgactttaaaaagaaaatgtgatgggtaataacaataaaatgggcacaattatttagaagaggcgtgtttgtgccaagaaaattacagaggcagagtaagatttgcaaggagatggcatttttctcataattgctctctggatgtgtgtgcagcaggtttcatttgagggtggccactgttgagaacttctttcacagcaaagtgctgctacacctaaagttttatctgctcttccgtggtttcatcttagctaccatagcaacactaacagtgctattccaccctcccatcaacattcaggagaaggcttctcttgtctgcacgggattgcgcttacatccacttagagagcattcccaattcatcagatgtatatcttttagaaacggtttcctgaggagaaaaataggtattttgagagatggttatgatatttttagcccactgagcaattttgatagccttatcatagacacagatccaggttctgtgggttctaaagattatactgttaaaagtggggaggggttggggatggaaatactgttttttgaaaagaatacaaatttacaaattcaaaattagatacaaaaatgaatatttacttaggatgagaaaagcaatcacatcacattacaaagctcggaaagctgatatataggtatcacaaactccagaaaaagaaccttgtcttgttttttgtattttttttttttttttttttttttgagttggagtctcactctgtagcccaggctggagtgcagtggctcgatcttgggtcactgcaagctccgcctcccaggttcacgccattctcctgcctcagcctcccaagtagctgggactacaggcgtccgccaccacgcccagctaattttttgtatttttagtagagacagggtttcaccatgttagtcaggttggtctcgatctcctgacctcgtgatctgcccgcctcggcctcccagagtgctgggattacaggcgtgagccaccgcacccggctgccttgctttcattaactgtcagacattcttccataatagtttttcctataattttatatctgtatactcattgatttcctctttatgaaggacttcgtaggagcatttctggagagcaattagaaaatgtctttccactagcatagtgatccaaatcaattttttttttattcttgacagtctgaaataacttctttcagcttcacagctcattattggttatgacatgtacatttttagaattgttgcaaaatttaggaaatcctctatcaagtttattttgtatgtgaactgtcagatttggaagaatatttcacagactagcttttggctctgaacattccaaaccgtttttctcctccactacccacacagttccagtgtcaagcaccagaggacacgttcatatcacagtacaaaatccaactctggtaccttttgtcgggaagctcaatattgacagcccaataggtgataggaatattccagtcctgacagctggtaactgcaaaactttaggtgatctgcggtcatttccacacaattaaccatatagggaaatgaccccaaatcacctaaagttttccttcctaaacttatttaaaatatacccaagtgaaattcctcttaccctcatgcaaaaaaaatacttaaggctattccatcgccacctgaccaatgggaagtatgatagaggggtagttggtgttgaaagagacagtggtcttgactgattgcaattaaagtatgttaattttgccagacaactgagggacactgaccttgagctctaggggcttctcagtgagcctgcatttgtttaggatgcattgaggcaacgcttgcccacaccaatctcccttagcctacatctggccctaaagagagtccacatgtctaaggtttgcttaacattcctctcaggctttccaactccctcttgctttcgttttctttatccctgtcacttctttatccaaccaaagactgagtgatcaggaggaaaataagactgactggcagagaagatgtgcatgcatctgtcattcggatcatctccaatgctctgatctatgttctttgttattaaggctctccaaaaattattttgaagaatggactgagtttacatctctgatatttcatctgtattctgccttttcatttttgtagaaggcacataacagatgtacaattaatataaaaaagaatgagtgccagtgacttcagtgaatattgatgaaaacatttcttctttggtgtgtaggggtgagatttttcagtgaagtgctgccagcatttgctctgcacagtctctagaacttctagaatgagacattatgcagccatatcaacagatcagttgaacatggagaaggtgataggaagcttttgttaaactgtgacagatgaactattatcttattcttccccgtttcctaccataaaagtaggcaagtggggagagatactgatgtgttgatgcaatagcacccactgacgcacaaaaattgtttctttctgaatatttcgagaaagarctcctgtgttttcaggcttgtagttcagccacatgtatccataattgactgcagtatggaataaaacttacaagatagctatgaaagttgactgttttgtcatctagagacttgataactgttttgttgcaccaggcatgaatgttttaggcagttttttgtttcgtatgtcatgatgccatattctaaatgagcatcaccacttcccttggcatatttttgaaacactctgcaaagcattacatggttaattgtcagaaaactgtcactgaggaaagtggaaagtgagatcctcttccccagtccctggcaaagagcattttttttttcttttttttggtattggtaagcgtttaatatccagttctcaaaacaaccccccccagtaacccccataccacaaaataacaataacctgatgtatagcatttgcaaattgtcattatatatatatatacaatttaacttctgggatacatgtgcagattacagtatttgcaaattgtcattttatatatattatatatttaatgtaagttctgggatacatgtgcagaacatgcgggtttgttatataggtatacacgtgccatggtggtttgctgcacccatcaacccatcatctgcattaggtatttctcctcatgctatccctcccctagtcccccaccccccaacagccccccgtgtgtagtgttcccctccctgtgtccatgtgttctcattgttcaactcccgcttatgagcaagaacatgcattgtttggttttctcttcttgtgttagtttagatttttggaatttcctgagtgatagaggtgaaaggagaatattttcttattcataagtctcactgaaatggggcttattataaatggttaattatccaaaaatcaaagtgaaaaaagtagaaagagttatttgtagaataaaacagaactcaaggtatatccagggcctccatgttcatcaattaatccctaaactacacagcatttatatccgtaaatatgttatagtaaatctggaaatataaaatattttaaattgataatgttagggaagccaagagtcacagagttaagagggctgctctgaactgtttttgtttttgtttctgtcttatagcttgtttaaactagaaaggaccaaatgccgaacctactcatgtacagatgagaaaattgatatccaaggaaattaagtaacttaccctaaacctacaacctgctagagatagtcagggctaaattctatgtctgctaattaactcagaactctttcactgaaatatcctgcatatctctatcaggatatctctatcctgatggagaactctttctctatcaatcctgcattattgaataattttatgtgatgtgacactcagtttgcaaattagactgagcagtactttggatcctcaggaactcctgtttttaaagagatgccatgttctcttttgttcattatcattgaagatagaaatgtcaactcttaaaaacataagattttgtggttgaaatttttccttatattttatagaaagtctctgcatattttgtgctccatgtattgatttcctgttgctcctgtaacaaattattacaaacatggcttaaaacaacacaaatttgctattttatacttctctgggtcacatgttcaaaatggatcttactggctaaaattaargtgtcagcaggtctgttttcttcctggaggttttargagagagcccattcccttgtctttttcagctcctacaagtcacctacatttctgaactcaaagccttttcctccattttcaaagccaacagcatcgtatcatccaatctccctctgtctctgaccctcctgactgtctcttaaaaggacccttgtcctttaagattargcccaactggatcatcccagataatctccccatctgaaaattctcaccctaatcatatttgcaaagtctcttttgtcatctatggtatcatatggacagattttagggattggaaggtagacatattggagtgggataaagcattattctgcccaccacactgccctcttaacttaaaagaattattttaacttgtttctcactagacgttgctttagttttacagtttcttcaggtttatcagaaatagaatgagaagtagcgwtcatctcagacatttgcctaaaataaatataatttctgacacttacaaaatgtatttatctctctcatattccagtttaataatggagaccttacttgttatgtatttgtgttttttttaataataaaataaggagaaaaaagaaacggaattgtgagattatatttagattggggaaataaataattccttaggttctttaaagggtgagagaacaaagccccttcaatagaaacgattttgtatgacattgtattaatttcctagggctgccataacaagtcaccacaagcttcctggctcaaaataacagaaatttctctcaaagttctggaggctagaaattcgaaatcaaggtgttggcagggccacactctctctgaagtctctaagaaagcatccatcctgtcctgcctcttccatcttctggtggctccaggcattccttggcttgtgggagcatcactcccatctctgcctccatctttacatcatggtcgtctctacgtctccatgtgtccttttcggtctctcacaaatatactttcattaaagttagaatcatcctaatcttcatccagatccttagttatgtcttcaaaaacctatttccaaacaaggtcacattctgaggttcaagatggacatgaatttcgaggggggcactatttaactcgctacaggtataattatgtatgaaggaattattctttataattaactttctagtttgtgttayacttctctttgcttaaaaaataaataacagcaaatcattagctgctttcttcttcggtgctgtggacgtttttttctgttattattaatattgatccagttcttgggaattttctcaatgctaaatgataatgagaggaagaaagataacaatgattctcattgaatgttttttgctatattcttggcatagtgctggatactttacaaacatccaatccccataacaatcctggcaagtagttatattattatagtacacataaaaaactgaagttcaaaaaggctcagtaacttgaccagcattatatacctaggaagtggcaggggtcagaatcagatataacaaaatttctctctcttccaattttccagtattctcatcttagggtccattctgtccaaggcckttcctcagacacatccattctccttcagttctcacttttgaattcacctccaagcttatacactagcaattgacaactaatacatagccttcaagctttttgcaaacaaactacaacaatagcacaacaacaactagaacttcaaaagtttgaagagtagtgaaaaaagagaaaacaaaccaatgaacaagacatcactaaacagtcctattggatttgggaaccacaggaagcagatggaaaatgctgaaacatttctctagagtcattgaaaaatgacctctattaaattggaaagaattttagggttccggtcttagatcacaaatgaaataaaaacagtttcataaagacacaactgtttctgagtaaaatatatctagaagttccttgacttactaaatgaatttaccttgggaaaaaacatatttcttgaaaaatattttaaatagaagggctatccctctaaaggctctcttataacataactttgaaagtaaacataagccaacaaacaaactagaaagcaatattgtcactatattggttaataaataaaactgggaaaaaataatatgaacattttgaatactggtccttaaataggataagtatttgaggatgttgacagaatcagtaaatacattaacaattctttttgataaacatttaagtagagcttttgaaaaaaattttcttcctttctttattatactatccctcaatggttgaaaatgttgttttttgacatgagggatacttcctttctcttattgattgaactattgtgttctagtcttaaatttattctctttttgtaagaggatacaataaaaktatgagtcaaagaatatattggggatttcaaaaaattcattagaaatggaatttaacataagctcttaatataagctccatcaagttcaagacatttttgtaaatgatgataccatccatttgctccattcctaaagaactgagggtcctgggaatttaactatgtttatgctgtcttttctgcataattaactgaagaaaatgggtatcctttacagatttttttaagattaggaaacaaaaatcagtcaaaaggagctaaatcaggactataaagtggatgcctaatgatttcccatcaaatgtctcataaaattgcccttgattgatgagaggaatgagtaggagcattgtcgtggtggagaaggactctctggtgaagctttcctggatgtttttctgctagaactttggctaactttctcaaaacactttcataataagcagaggttatcattctttggccctccagaaagtcaacaagcaaaataccttgagcatcccaaaaaactgttaccttggcctttgctattaccagtccacttttgctttgcctagaccaagttcacctcttagtagcaattgctttgattgagtttattttcaggatcatactggcaaacctgtgtttcacctcctgttacgattcttcaaagaaatccctcaggatcttgatctcatttgtttaatattttcattgaaagctccgtttttgtctgtgagtgatctgggcacaatgattttggcacccagcaagtggaaagtttgctcaactttaattttgcagttagaattgtgtacgctgagtcaattaagatgtctatggtgttgactgttgtttcactggtctttttcaattagggcatcaacaagattaactttttttcccacaaagtgatgtggatggtctgctgctgagggcttcatcccacaacatggtctcaacccttcttaaaatgaggtccatttgtaaactgctttcttgtggggcattgtcctcataaaatttgtgcaaagcattaatcatttcattattcttccaccccagcttctccataaatttgatgtttgctcttgcctcaattttaggggagttcatgttgctaataggggcacctttcaaactggtatcttatccttcttcatgcttcaaactagatcctgcccagacatgttataacaagttaatacaagttattttggtacaaaaaaaatgaaatctatgcatagttttttcataacacacattttctatgaactttttgaagactctctygtacatggcatatccacctttagttactgaataaataaataaaagatgctcttgcttaaattgttcatgtgtgctagaactttatcccgagcccttcattctcatgttttgcactttcctgtggtgattttacataaacccatgrgtttgttaatatctgttaaattgatgacagccaaacytatggctccagcagagattctactcctgagtgtctgacctctatatccaagcacattttatgcttgactacttaaactacttgagtgatcctagagatcttaatttccacatattccaaactaatcatatcatcctttgcccaaaacctggcatttctgcagatgtaccaccacccgtatcattcaaccagttcagacatctggggtcaccagatgtttccctcatactcaggacttatctggccaccaaatctggagatacctgtctcctaaacttttctcatatccttcaccttatctccaattcttctgctcacctacattacagtaagacctaatctgtctctatccctagattcttgactccattcaaatgagtacccctctgccattaagtagttttataaatccttaaatagcttgccctagctttcagcctaagatcaataataatggtgattgccatttttgtgcctattatatgtgaaacactattctagacacttgacatacatatmtttgcattagctctcatctgatatcagtctggtaagatagatattaccctaattttataaatgaagaaactgaatgtcagaaagcttagatgatttactcaagactactgagccagttcatgatggagctagggttcaatcctaggatgatggtctggatgcaaaaccttctgttccactggacctgttgctgaattgaaacttgtaagatcaggacacaaaggctgttgatgatctggaatgctcagatgctgatcttccctagcatgggcagttgcttcagtaataccaaagtattaccttctctttcttctctcttttttaacctcatacatatgtacccttttaaaaaattcatggaagaatacattcaggttgttaaaaaattcaaataaagtgaaagtaattagaataaattatacatcctccacacagccccaatctcctcccaagagagctaatcactttcagacactgatgttgactgaattcatttaatctaaagacttagatctcttctcctctatgaagtttctttctgtctatcatttctctttattccctctgttctctgcctctgaaacttctacccagcattctttgtgccacagactgctcgagatactgagcacagcctatataactatatttaaaattgtataaaattagatgcacaggattacaaaggaaaccaattttattaaaatgcagttatctaaatattaaaaagtataatataggaatacaattatgaatgcatcaataacaaaatctagcaacgtatttgatagatatgttaattctgcactactgatgagcacagattgtattttgagatacttgcagcaataatactatcatgaaaatacctgtaatttttgctgatagcaaagtgacatgtactgctaatactactgtgatttttgsctacatccatatttgggggagttattaaattttagttagagtatattttaaaacatgtaatttcttttttctatccaaaggctccttgaaatctatccatggcctcattttagtattactgagcttttaggatttccactatcttcaatatttcttgtactttctctaatattttctagtcttttacactgtgttctaaggttaactttctatttagatattttactccaatggtaaagaaaatttattatattacattataatcattgttttctacctagccctgttataattttatgagtaaattacatataaatgcattcaatcactcaaagaaaagcttccaaaggaaagagaaattgaagtaaggttgatgtggatttcttgaaaggaataattaagaaacattttgcatattattaaaagcggttatcagataatcattctttctgcaaaattagataaacccagggatgatccaagaatccagagataataatcctatattaacctttgctgttactttatggttagtctagaaacaatgcagtggtctttcaatttggaaatgaaaatgttaacatgtaaggtagtatgaaaataccttcatgaaaagtatgaacaaataaaaaatatggtcaagaacttgtaaagttgtacttacatgttatatggtaaattttaagaggtgatttttccaaatagaaactaccacctaaagaatataaaaagaagaaagggggagggaaggagggagagacagacattatttttaaatgaataagctaaagaacatttataaaacaatcaaaattttttttgcagttggaataataggttttttatacacattcattatgttgtaaatgttttcctctccattaatttacattaatgtcatacaggactacaamaaattagggttcagagttatagataacctataagccaatgcaaacagtcgatcaccagtgtttctgtaagaatgaggatggtttattatttacatccttttactttgcagtaactattcaagggagaaggcaaacagaaaatgcatcaaatctcagtattattgtctatgtttttctgttgccatcagctaatgctctcattctgattcatacccacccagcttctccactgaagtcaatgagaaacttcctttaaaggctgcagagtcacactcacaattgcctacagcagatgggtaaactaagtctgagccctgccccttctcccagtactggtcccctgaaggccaaggcctgagaaatgtttaaaaatacttgcattccctgacaacaagataaatttgtaatgtggattttttttatttctctgaacaaatcagaacatttgacaacactggacctgctttccagctatacaacaagcagcaggttcctgattttgccattttgccccatcaagttcaatggggcatgaactctccagcaggttcatcatatacattatacccagaatgaagtcctagcttttcagcgtagaattcaacamcrttcatgattctgcactcccctgctttttttkttattatttatttattttattattattatactttaagttttagggtacatgggcacattgtgcaggttagttacatacgtatacrtgtgccatgctggtgtgctgcacgcactaactcgtcatctagcattaggtatatctcccaatgctatccctcccycctccccccaccccacaacagtccccagtgtgtgatgttccctttcctgtgtccatgtgatctcactgttcaattcccacctatgagtgagaatatgtggtgtttggtttttttgttcttgcgatagtttactgagaatgatggtttccaatttcatccatgtccctacaaaggacatgaactcatcattttttatggctgcatagtattccatggtgtatatgtgccacattttcttaatctagtctatcattgttggacatttgggttggttccaagtctttgctattgtgaataatgccgcaataaacatacatctgcatgtatctttatagcagcatgatttatagtcatttgggtatatacccagtaatgggatggctgggtcaaatggtatttctagttctagatccctgaggaatcgccacactgacttccacaatggttgaactagttgacagtcccaccaacagtgtaaaagtgttcctatttctccacatcctctccagcacctgtcgtttcctgactttttaatgattgccattctaactggtgtgagatggtatctccttgtggttttgatttgcatttctctgatggccagtgatggtgagcattttttcatgtgttttttggctgcataaatgtcttcttttgagaagtgtctcttcatgtcctttgcccacttgttgatggggttgtttgtttttttcttgtaaatttgtttgagttcattgtagattctggatattagccctttgtcagatgagtaggttgtgaaaattttctcccattttgtaggttgcctgttcactctgatggtagtttcttttgctgtgcagaagctctttagtttaattagatcccatttgtcagttttgtcttttgttgccattgcttttggtgttttagacatgaagtccttgcccatgcctatgtcctgaatggtaatgcctaggttttcttctagggtttttatggttttaggtctaacgttttaagtctttaatgcatcttgaattgatttttgtataaggcgtaaggaagggatccagtttcagctttctacatatggctagccaattttcccagcaccatttattaaatagggaatcctttccccatttcttgtttttcttgggtttgtcaaagatcagatagttgtagataggtggtgttatttctgagggctctgttctgttccattgatctatatctctgttttggtaccagtaccatgctgttttggttactgtagccttgtagtatagtttgaagtcaggtagtgtgatgcctccagctttgttcttttggcttaggattgacttggcgatgcgggctcttttttggttccatatgaactttaaagtagttttttccaattctctgaagaaaggcattggtagcttgatggggatagcattgaatctgtaaattaccttgggcagtatggccattttcacgatattgattcttcctacccatgagcatggaatgttcttccatttgtatgtatcctcttttatttccgtgagcagcggtttgtagttctccttgaagaggtccttcacatcccttgtaagttggattcctaggtattttattctctttgaagcaattgtgaatgggagttcactcatgatttggctctctgtttgtctgttgttggtgtataggaatgcttgtgatttttgcacattgattttgtatcctgagactttgctgaagttgcttatcagcttaaggagattttgggctgagacgatggggttttctagatatacaatcatgtcatctgcaaacagggacaattggacttcctcttttcctaattgaataccctttatttccttctcctgcctaattgccctggccagaacttccaacactatgttgaataggagtggtgagagagggcatccctgtcttgtgccagttttcaaagggaatgcttccagtttttgcccattcagtatgatattggctgtgggtttgtcatagatagctcttattattttgaaatatgtcccatcaatacctaatttattgagagtttttagcatgaaaagttgttgaattttgtcaaaggccttttctgcatctattgatataatcatgtggtttttgtctttggctctgtttatatgctggattacatttattgatttgcgtatattgaaccagccttgcatcccagggatgaagcccacttgaccatggtggataagctttttgatgtgctgctggattcggtttgccagtattttattgaggatttttgcatcaatgttcatcagggatatgggtctaaaattctcttttttggttctgtctctgccgggctttggtatcagaatgatgctggcctcataaaatgagttagggaggattccctctttttctatttattggaatagtttcagaaggaatggtaccagttcctccttgtacttctggtagaattcggctgtgaatccatctggtcctggactctttttggttggtaaggtattgattattgccacaatttcagatcctgttattggtgtattcagagattcaacttcttcctggcttagtcttgggagagtgtatgtgtcgaggaatttatccatttcttctagattttttagtttatttgcgtagaggtgtttatagtattctctgatggtagtttgtatttctgtgggatcggtggtgatatcccctttatcattttttattgcgtctatttgattcttttctctttttttctttattagtcttgctagtgctctatcaattttgttgatcctttcaaaaaaccagctcctggattcattaattttttgaagggtattttgtgtctctatttccttcagttctgctctgattttagttatttcttgccttctgctaccttttgaatttgtttcctcttgcttttctagttcttttaattgtgatgttagggtgtcaattttagatctttcctgctttctcttgtgggcatttagtgctataaatttccctctacacactgctttgaatgcatcccagagattctggtatgttgtgtctttgttctcgttggtttcaaagaacatctttatttctgccttcatttcgttatgtacccagtagtcattcaggaggaggttgttcagtttccatgtagatgagcgattttgagtgagattcttaatcctgagttctaatttgattgcactgtggtctgagaggtagtttgttataatttctgttcttttacatttgctgaggagtgctttacttccaagtatgtggtcaattttggaataggtgtggtgtggtgctgaaaaaaatgtatattctgttgatttggggtggagagttctgtagatgtctattaggtctgcttggtgcagagctgagttcaattcctcggtatccttgttgactttctgtctcgttgatctgtctaatgttgacagtggggtgttaaagtctcccactattaatgtgtgggagtctaagtctctttgtaggtcactcaggacttgctttatgaatctgggtgctcatgtattgggtgcatacatatttaggacagttagctcttcttgttgaattgatgcctttaccattatgtaatggccttctttgtctcttttgatctttgttggcttaaagtctgtttcatcagagactaggattgcaacccctgcctttttttgttttccatttgcttggtagatcttcctccatccttttattttgagcctatgtgtgtctctgcacgtgagatgggtttcctgaatacagcacactgatgggtcttgactctttatccaatttgccagtctgtgtcttttaattggagaatttagtccatttacatttaaagttaatagtgttatgtgtgaatttgatcctgtcattatgatgttagctggttattttgcttgttagttgcagtttcttcctagtctcgatggtctttacattttggcatgattttgcagcggctggtaccggttgttcctttccatgtttagcgcttccttcaggagctcttttagggcaggcctggtggtgacaaaatctttcagcatttgcttgtctgtaaagtattttatttctccttcacttatgaagcttagtttggctggatatgaaattctgggttgaaaattcttttctttaagaatgttgaatattggcccccactctcttctggcttgtagggtttctgccgagagatccgctgttagtctgatgggcttccctttgagggtaacccgwcctttctctctggctgcccttaacattttttccttcatttcaactttggtgaatctgacaattatgtgtcttggagttgctcttctcgaggagtatctttgtggcgttctctgtatttcctgaatctgaacgttggcctgccttgctagattggggaaattctccaggataatatcctgcagagtgttttccaacttggttccattctccccatcactttcaggtacaccaatcagacgtagatttggtcttttcacatastcccatatttcctggaggctttgctcgtttctttttattgttttttctctaaactttccttctcgcttcatttcatttatttcatcttccattgctgataccctttcttccagttgatcgcatcggctcctgaggcttctgcattcttcacgtagttctcgagccttggttttcaggtccatcagctcctttaagcacttctctgtattggttattctagttatacattcttctaaatttttttcaaagttttcaacttctttgcctttggtttgaatgtcctcccgtagctcagagtaatttgatcgtctgaagccttcttctctcagctcgtcaaagtcgttctccgtccagctttgttccgttgctggtgaggagctgcattcctttggaggaggagaggcactctgctttttagagtttccagtttttctgttctgtcttttccccatctttgtggttttatctacttttggtctttggtatggtgatgtacagatgggtttttggtgtggatgtcctttctgtttgttagttttccttctaacacacaggaccctcagctgcaggtctgttggagtaccctgcagtgtgaggtgtcagtgtgcccctgctggagggtgcctcccagttaggctgctcgggggtcaggggtcagggacccacttgaggaggcagtccgcccattctcagatctccagctgtgtactgggagaaccactgctctcttcaaagctgtcagacagggacatttaagtctgcagaggttactgctgtctttttgtttgtctgtgccctgcccccagaggtggagcctacagaggcaggcaggcctccttgagctgtggtgggctccacccagttcgagcttccaggctgctttgtttacctaagcaagcctgggcaatggcgggcgcccctcccccagcctcgctgccaccttgcagcttgatctcagactgctgtgctagcaatcaatgagactccgtggggtaggaccctctgagccaggtgcgggatataatctcgtggtgcgccgttttttaagcccgtcggaaaagcgcagtattcgggtgggagtgacccgattttccaggtgccgtccatcacccctttctttgattaggaaagggaactccctgaccccttgcgcttcccgagtgaggcaatgcctcgccctgcttcggctcatgcacggtgcacgcacccactgacctgcacccactgtctggcactccctagtgagatgaacccggtacctcagatggaaatgcagaaatcacccatcttctgcatcgctcaggctgggagctgtagaccagagctsttcctattcagccatcttggctcctccctccactcccctgctttttaagacatgctgcctgctctcctcaaacaatggtgacctccagrcctctatcttgtaggatccaacttggctttcatctttttaggaagcctcctgtaatatccctttcttcaatgtcgattgttcatgaaattccttagcatttagttgtggcctctcttatgacaccttatcgtgggtacattgagatttaattttattagtatttaacatttcataattgtgtgtgtatgccttcttttcatgcattacataatcttttcacaactagaccaagttctgatatctgttattaggagccaaacccagccctgtatttacttgctgtgggaacttgggcaaattattgatcccctctaatcttcactcagtcccaatatttgtaaawtaggaataatacctactcatgaagttattgtaaaacttaatgaaacactgcatgaaaagcattttgctcagtgtcagggatgcagtaagaactcagtaaaaatgtttgtgttataatttctctaccattgtcactctcttgagagctattaaatgacttatccctgatttcttcttacctataggccttttattgccctagaagtttgcacaactaactttccacaattcttcctggtaataatattaccgtgaaaatattcttccaatattttaagattccctcatcattatattactttaatttctgtgtaaagatcatatagaatacaaataaaatgagatcgttatttgctcttcaggtaccacattaataacaatttctacctaccatgtattgatcgcctattatgtggcaggcactgtgctagatatttatttttcttgccttgtcrctagtgttcaaaactccacaaggaaagtattttgacacgaattttatggctgagaaaactgaggtcccgagtagttaagtaaattatttgtttattctacatctgtgtggcagaactgggttcgaaatgagatctatatgtaaaggctatgcactttttgctaatttcctattgccttgtgtttattatctagttcactattgagccattcagatacaaattagccctagtaaacctttgtaatttctagaaatattgcaattgtatatgtttaatgtacaataaattcttcttaggctatcgctaataatatttctaataccccaatatggctttcttagaaaataaaggctacttgagggctgggtgckgtggctcacgcctgcagtcccagcactttgggaggccgaggagggcgatcacgaggtcagaagatcaaaaccatcctggctaacacggtgaaaccctgtctctactacaaatacaaaaaattagctgggcatggtggcaggcgcctgtagtcccagctactcgggaggctgaggcagaagaatgcggtgaactcgggaggcggagcatgcggtgagccgagatcgcgtcactgcactccagcctgggcgacagagtgagactcggtcttaaaaaaaaaagaaaaagaaaaaaagaaaagaaaggctacttgagaatgaccaagttattatattaagactttttccagatgcaagtaaaaattacgttacattgttttgtgttgtagcattaacaatgctcaatgttttgattaataagtgtctgatttgatatatcagttggatattacttgtgaaaacacgatctgtctcattgttggatattggtttttgatagatcagatttaatgtattacatggacatttatgaggttcttctacatacaatataattgatttaatacggatctggtttatggctggtgtatttaatttcaaaatatatctggcttaatacttaatgtatttgttttgatattcggcattttgatgcaatgttcaagtgtatgatttgataagaaatatattgctcatgggcatgaagaaaattgtaaaagaaaattatcagtagacagtgaacagatgtgtaattatgcagaaataatcacatttttagagcagaaatctaaagtgaaaatatgtttcaaaaagatgtgttagttttgtttaggtaaacattggattctcagcttcattcaattaaacaaacaataacaacaaacaataagcatataagacctcccaaagtcagctatttttttaacaaattgaaaattaatttactttgttgagtctttcctcatgtgayagtaactattttatatattttgataagctgttacttgaagtaaatatatttctacttgtagtttttatgtgtttctgttttgaaaatctacagctccgaaacatcatgatgaatgttttacagtcttctagttcacagggaaacagaatgcaagagacttaccagcttctcctaggatgcrttaggagtcagtatactttttagtttatgtatgagattgttttgcctgacttaccaatagaatgaattttaatgctctcctgctcatttgtgatttctctttcctaggagagaacttcctataattccctcagaaccatccctgtccctattgttcatcatccttatcagagcagtcactccagcgaatctccytatctcaaaacccagaagtcccaagacactcttcattgcctgtcctcttttgcctcccaaatttgttagcttgcaggttcagctgcttctttctacttcttttgaatccaaatatttctttctgcctcaacgaaaatccttgcctacatacctaccttacaaccaaatgttagtcacttagttcctgttatgttctattcccaagctgtgtttcacacttgaacttccatctactgaatttcattttttgctactctatatttgatacctctggatcaaatataaactgttgcattgaaagctttctgttagatagccctgacttaaaggattgcagccttattccttaataatatcaataggaaagactaaaaatatagacagtttgctgtgaacgaacaatggactatcatatactctatacattctctggtacaacatacatgacaactatccaagttagggatgtggaaacttaagctcgttgaagttaacacagtctaataagaggaatgtcagatttcacatttcacacccgggcggtctgactctagactctgtgttcttagatccaaatgatatcacttattgttatagcttccattccacataggcaatcttacaacttcataaaattattccatttcttccagctgctatccctccccccatagtccactgtctctttcttttcattctttatctctctttccctcgttcactcattccttctcatgcttcctttctcactcactctcttttaaagtttttttactgtgctaagcaccaatgaattttgcttcaaatcactgactctaagaggtttctaataggtttcttgctgacaaagagaataaatgttaacttttccctcttaggttgttgctctcgtttcttttcaaccaaatttattctgattaatcttacttatttttctaagatttaacccagttttaagaagatttccatatgagcaagttataatactatctatatttgcattttagtatgttttgtatttacagattttgtatctaccaaaatgcatcttcttgaaggagaatgcacctctagatgcaaactaaaactatcttttgcctctttctttatcctctttcatagctttctgtttctgtttctatgttttattcagacaaaataatgcaaatttgtgcatatctgtgtgcagagaagagattgaagcaagaattgtataaaatgtgccttcatattgagtatatactgtaattattttttatttataatttcttcaaggcatagaacaaaacccactctaatctgtcactaaataatgctgttaatgctaattttttctttttaagtttttcagtaattacatatataatctagactaagaaaatcatattctgaattaaacattgccacaaaattttacttccaactcgattctaggatatttaaaaccaggaaatgatactgtctcctttcacttctggtctgacaccgaatagagtgctggtgcacagtccatacccaacaaatgttgttggatggacttgaatgtgaatcacctgcagcactctgtttaatgattcagcatctattccactagagaatgcaaaagaagcagatctggagaagagaaaaattttatagcactgtcattagtggtcacttctaagcacaaggaaacttaaaagtgtttcacctacaatttagagtaagaccagcctcttcaggtgtacttcaggtaaatagattacaagtaaattgtaggcatttctttaagtgaaaaaagcttttagatgattacagaaagtctcacaaaaataattttatcatcattgaaactttctgtaattttctcctaagtaaatttcacttccaaatgtgtcatttcagtttgagataaaataatcctaaaactatggcttccatttgcttccatcaatctactggaaaacaatgtgattatatacacacagaaaaatgttatgttctgattccagtattggcttagtatcttataccaaactaaccctttcacaaaagcagccagaacctgaaagagatatgacccttgagagaagaaactgcacaaggaaagagtcgcagttacatggcttttcccctgagcacacttccaagtccacacacagatcaagacagctagcattcaagaataaagttgcagttttactggcttggagtgtcacaggatggagttagggttgctagacatctgaaaattaagagggaataccagaaagatgagaatcagaacaggaagagtcctaaaattggcattcatactgcccttaaattcttggataaccctgaactgtgtatgcacaggggagaaaccatgctggaaaaagcaacggctagaaggcccaagatttaagcgtaacttagctgccatataccacagcgtagacaaagtttggagttcaagccctgccaaattaaaagggctgagtaaactcatcaggtattccattaaaattccagaatgaatctgtaggattaaaactatgtctcagtacaaatacaagttccttaaacaaaaacacaaacttgatacattggattttacaaaaacaaaaaaaattctacttatcaaatattctattaagaaaattaaaaaggtaagccatacaatgggagaaaatatttaccacacatacatatctctgacaaagaccttgtatctcatatataaagaactaaaatcaataatgaaaagacaaatagtataataaaaaataaacaaaagattggaacagtggtttcataaaagaaaatatacaaattaccaataaactcaaaaatacttaattaacatcattagccaccaagaaaatataaattgaaaccacaatgatatacatttcacatccaccataatagctagaattagaaagactaatagcaccaaatattggcaaaaatgtggagtgactagaacttacatatattgatgatgtaaaatgcgtaaaaactactttggaaatctgtttagcagtttcctaccaaactaaaggcatatatagcctatgacttagcagttccaatctcaggtatttacctaaaagagaggaaaacttccatccataaaagactcatattggaagcaacccaaacgtccaacaatggggaaatggaaaagcatagtggtctactcagacctcaatactgcaagaaataataatgagctactgatacacaaaccagttggctgtatctgaaaagcattgtgctgttcaaaactagccagagtcagaagagtacatgccatttgatatcatttctatgaagctcaagagccagcaaaacaaatctgtcatggtgagagaaatcagagcaatagtgcccagagggtgaggaagagggcaaggaaaatttctggagtgatggaaatgttctgtatcttaactgaggcagtagattcacaggtatattttttaatgaaaattcattgaatttgagactcaaaatctgtgcttttcatgataagtaaatttgcatgctacaaatggttgtactgtgtgatttgaattggatttggattaaatatagcatgattatggtttggattggatggacagttggactggattaaatacagcataaccagatgataagaaytgaaaatagagtatatgcctactcaaggaagttcctgactcacccctctcctatacatcatatcctacccaacataaatacatgggtgtcctggaacatgtcccattttcatgccttattcttcacttctattctttaggattatttccttttcctggggtttactcttttaataaattgggaactgctgcattcaatgaggggcattttaactaaggaatcctgataacaccaacagctgagttattcttgctagctagtaatttccaaaagttcagccatgaaaaagattagtaattgaatctatgcaagattaagccaaccaagacacaggtttcactgaagcttctaaaatattacttgtaaaatgtttactgggattagtcctgtttaatctctgaccaaaatttctattcttcctttgttcctctgtctttaaactttgataatgataatttttttcatcaagccactttatagaattttttccacattgatgagaaaaaatactgattctctggcttctttgaaagacattctatccttatttggagtaaccatgttattatgaataacactattatattacacctttattttctcattgctgggccaagaagttagtgagatactgaattgtgacaactgatcaccatatagtttctttttaatgmccttgtgtaatgtgtaatagactgtgaactatcatcaccttaaaatgtcatcatgttttcataacatgacaaagtwataatgtaaaaatgctgaatttagtaattgaaaactgccatgctcagcgagtgatattgccaayaccaagtcctaatttaagagttagtttactcattttccacttcattttataagaaaatcttcccattttgcttttcagagaggattgtgttattatacgggcaattctttttcactattaagcaataatcaaatgctgagtttttccttaactcttatgtagttgctcttgcccaaggcaatcaatttagttaagtgttacctgtatagtcagtctaaaaaaagttgtctgccctaaagctgcttttgatgcatgagtgtaccttgttttatggggcttattgcactccacagagattgtgtgttcagtaaattaaaggtttgcagcagccctgcatcaagcaagtctattgatgccatttttcccaacagtgtctgtcacattttggtaatgatcacaaagtttctaactttttcattgttattatatctgctgaagtgatctgttaccagtgatatttgatactactattgcaattgttatgaggcactgtgaactgtacccacatgatggctaacttaatcagtaaatgtgtttgttctggctgcttcaccgactgacagtttactcatttctcttcctctgctcaggcctccctaatccctgagacatagcaattttgaaattaggccaattaataacctacaatggtctctaagtgttcaagtgaaaggaagagtcacatgtgaggaagacaggttgaaagccaagacaggctaaaagctaggcctcttctgtcagatgattagccaagttaaatgcaaaggaaaaattcttgaaggaaattaaatgtgctactccaatgaatgcatgaatgataagacagggaaacaggtggggtgcagtggctcacgcctgtaatcccagcactttgggaggccgaggcgggcaaatcacctgaggtcaggagttcgagaccagcctggccaacatggtgaaaccctgtctctactaaaaatataaaaattagccagacgtggtggcaggcgcctgtaatctcagctactcgggaggctgaggcaggataatcgcttgaactcaggaggcagaggttgcagttagccaagattgtgccattgcactccagcctaggggacaaaagcaagacttcatctcaaaaaaaaagaaaagaaaagaaaagaaaagaacgtgaaacagcctcattgctgatatggagaaagttgtagtggtgttgttagaagatcaaaccagctgcaacaacattcccttaagcaaaagcctaagccagagcaaggccctaacttttttcaattctattcacctctatgagaaacatgagaaagctgcagaagaaaatttagaagataagagcttggttcttgcggtttaaggaaagaagccgtctccataaaatgaaagtgcaaaatgaagcaacagatgctgatgcagacactgcggcaggtgatccagaagatctagtgaagatccattgatggaggtggctacactaaacaacagattttcaacgtagataaaacaggcttatattgaaagaaagttccatctaggactttcagagctagagagaagtcaatgcctggcttcagagcttcaaaggactgtctgactcttgttagggcctaatgcagctggtgatttgaagttgaagccagtgctcacttaccattctgaagatactatggaccttaaaaattatgctaaatctactctgcctgtgttctataaatgcaacaacaaagtctgaatggcaccacatctggttacagcatggttcactgaatattttaagcccactgttgagatctactgctcagaaaaaaaaaactttcaaaatatgactgcccattgacaatgcacctggtcactccagagctccgatggggatgtacaaggagatcaatgttttcatgcctgctaacacaagatccattctgcagcccatagatcaagaagtacttttgacttttaaatcttattatttgagaaatatattttataaggccatagctgccatgtaagtgatttttatgatgaatttggacaaagtaaattgaaaaccttctggaaagcattcacctttctagatgccagtaagaacattcactgttcatgggaggaagtcaaaatgtcaacattagtaggaatttggaggaagtccattccaacccccatagatgactttcacaggcttaacactttagtagaggaagtaactacaaatgtgatagaaacggtaagagaactgtaattagacataactgtaattagacatggagcctgacaacgtagctgaattgctgcaatcttgtgatgaaatttgaatgaataaggagtcacttcttatggaagagcaaaggaaatggtttcttgagatggaatctactcttggtgaagatgttataaacattgttaacataacaacaaaggatttagaatataacataaacttagttggtaaagcagcagcagggcttgagaggactgactccaattttgaaagttctactctgggtaaaatactgtctaaaagcatcacatgccacagagaaatcttttgtgaaagaaaaatttgatgaatgtggcaaatktaattgtcttatttttaaaaactgccacagacactccaagcttcagcagttaccaccctgatcagtcagtagccatcaacatggaagcaagaccctccamcagcaaaaagattacaacttgctaaaggctgagatgattgttagcagtttttagcaataaaatatttttaattcgggtatgtacattggcttttataaacatgatgccattgcacacttaatagacttcaatatagtgtaggcataacctttatatgtactgggaaaccaaaaagtcatgtgattcactttawtgcaatatttgttttaatgctgtggtctggaactgaacctgcagtatctctgaggtatgcctataattgggaatagtaatgtatagatatgaaggagctaattgaaatgcaagcccatctatgattatatgccaaaaatgactgttcttgagtagttctggggggcaaaaatcatacttttccataggaacaaatatcttcaaatttgcaatgtccaatgtgataacccactagccccatgtgactaatttaaatttaaatgtgttaaaattaaataaaatttaaaaattcaattcctcaatcatattagccacatttcaagtgctcagtagccatatgtggcttgtgggtatatattggacagcatagacatagaacactgccaacatttcaaaacattctatgaaactgtgctgagtcatacctacactttttgaatcttttggtatctatgctacttaaaccacaatggtttaccttaataatggtaacttaaatacctttattctgatggaacactatgtatagtctatatatagtagaaatatcattgatctgtcacaacattccgttattacttggtccttattaccaatgtttgagaattggaatatagtaatagttgaatgaatagggagttcaaggtatggtggtcttgtgaccacgagaaagaaagaaagtgaataattcttcaacaaaaagtatttatcacttgcctactcctgataatattgggccttgtgctagacataggagaggtgatgatactagcatgaaaagcatgcagttccagcctaccagaagtttacagttacatggcatagaacaaagtcaaaagaggtaagtataatgcaatgtgctaaaatgctgctttaggagtaaatacaaggtgcgataggatcatataaggggacactaaccaaagcctggggtcctggagaatttttaggaataagtgacatctaagctgatcccagttatgaaaagattagtagaagttagagaggatggtagaaagtagaactgaggctggccatggtggctcacgcctgtaaccccagctctttgggaggcagaggtagctagatcactttgggtcaggagtttgagaccagcctggccaacatggtgataccccatctctactaaaaatacaaaaattagctgggcgtggtggcatgtgcctatagtcccagctacttgggaggctgaggctggagaatcacttttacccggaaaacagagactgcagtgagctgagatcacgcctctgcactccaacctgggcgacaaagagagagtctgactcaaaaaaaaatacaaataaaaaaatgtagaactgagaggggaaggtgaacaggaaaacactccaagcaaaagaaaatgaatatctaagaaccaagggcaagaaataatacagccatttagggaattttaagtatgagaaatgagaacaaatgctgttcatgaaggtgagcccaactagagataaaattgatttctgttataaaagtagaaatgtctcacttattttaggatttaggttgttttacaatataatttcaaaagcaaactttctccctagtattttttcagaatccatatgcacatacctattaacagtggttgggaaagggaaatatagatggacagatggcaagatctagcaattttatcataaattttatgtgtattgggtttcttccaatcttcttccattataattttatgtaaacatattattcagtttaaagttaaggtgtgtcaatggccctcctggcctgactaggaataaatcagttattagagcaaagcaactatgagcatgtaattatgaataccctaggacttatacactcataaatcataggactcaaaagctaactattattttactgtatatgttaatgatggtatttaaaaattctaaacataaaacaaaaatatttgggcttttattcagtattctttactgtatacctaaaaattatgaatttgactatgtataaattaggccttaataaacttgactttcaaaaaatcttattaaaaaacaaaaaccttcaattaggtatttacacacatgtaattttcataaatgcataaatgtaactacacttgtcttttagagcattatttttactgttctgcttggcttttccccattcttctcttttttcacacctccagccatatttttctaccttcaaatgataacaaatggaatacatagtattattccatatttttctctaagcatttttaataacgtactaacatgtttacacatatactcatgtatttatataagtcctggtcattgttggtttaaaaaataggwttacattataaatactttctgtgtcttgctttttaatattctgcaaacacatcgtagaaatccttccatagcaccttgtatagctctagtagattcattttaatggttccataatgtttcctggcaggaacacatcatcattctatgactgatgaacattaccactatttccaatttgatgtcacaataaacaatgatgcactgagtattcttgtaytttaatccgaaatttttatttctcttggatagattcctgggaatggaattgctggaccaaaagacatctatgtattttttaatttgaatagatrttgcttttgaaaaaggctataacattttcctgtttccactagcaatatgtgagagtacacttctccatacatctccaccagcaatagatattaagtattgccagacatttaatagatataaagcagtatgcccctcattttattttgtactcaccactaatgagtttgggtatttttcatatgctgttggacatatatatttgtactattttgcattgcctcttcagatgccrtctatttttattttgcacacgctattcttttctagttaaatcattagagaagcatctgtataattttaaacattaactgtttgtcccccatgttccaattttttccaaatttgtcagtcttttcttggctttgtgaatggtgttttttctcatacaaagctacttttaaatgcttcatataaaccaaatgtctaactttacatatatatatatatacgtatataagtatatatatgcatatatatacacatatatgtatatatacacacacacatatatgtgtatatatatacgtctatgtgtatacatatatacacatatgtattctggatttaataagttggttaaaaattccttccttatatgtattacatatgctcccctggtttttcttatagggattttattattttattttaaactatttagtccaactgaaaattatttttttttctttttttttttttaattttttttttttattatactttaagttttagggtacatgtgcacattgtgcaggttagttacataggtatacatgtgccatgctggtgcgctgcacccactaacgtgtcatctagcattaggtatatctcccaatgctatccctcctccctcccccaaccccaccacagtccccagagtgtgatattccccttcctgtgtccatgtgatctcattgttaaattcccacctatgagtgagaatacgcagtgtttggttttttgttcttgcaatagtttactgagaatgatggtttccaatttcatccatgtccctacaaaggacatgaactcatcattttttatggctgcatagtattccatggtgtatatgtgccccattttcttaatctagtctatcattgttggacatttgggttggttccaagtctttgctattgtgaacagtgccgcaataaacatacgggtgcatgtgtctttatagcagcatgatttatagtcatttgggtatatacccagtaatgggatggctgggtcaaatggtatttctagttctagatccctgaggaatcgccacactgacttccacaatggttgaactagttgacagtcccaccaacagtgtcaaagtgttcctatttctccacatcctctccagcacctgttgtttcctgactttttaatgattgccattctaactggtgtgagatgatatctcatagtggttttgatttgcatttctctgatggccagtgatgatgagcattttttcatgtgttttttggctgcataaatgtcttcttttgagaagtgtctgttcatgtccttcgcccactttttgatgggattgtttgtttttttcttgtaaatttgtttgagttcattgtagattctggatattagccctttgtcagatgagtaggttgcaaaaattttctcccatgttgtaggttgcctgttcactctgatggtagtttcttttgttgtgcagaagctctttagtttaattagatcccatttgtcaattttggcttttgttgccattgcttttggtgttttgggcatgaagtccttgcccacgcctatgtcctgaatggtaatgcctaggttttcttctagggtttttatggttttaggtctaacgtttaaatctttaatccatcttgaattgatttttgtataaggtgtaaggaagggatccagtttcagctttctacatatggctagccagttttcccagcaccatttattaaatagggaatcctttccccattgcttgtttttctcaggtttgtcaaagatcagatagttgtagatatgcggcattatttctgagggctctgttctgttccattgatctatatctctgttttggtaccagtaccatgctgttttggttactgtagccttgtagtatagtttgaagccaggtagtgtgatgcctccagcyttgttcttttggcttaggattgacttggcaatgcgggctcttttttggttccatatgaactttaaagtagttttttccaattctgtgaagaaagtcattggtagcttgatggggatggcattgaatctgtaaattaccttgggcagtatggccattttcacgatattgattcttcctacccatgagcatggaatgttcttccatttgtttgtgtcctcttttatttccttgagcagtggtttgtagttctccttgaagaggtccttcacatcccttgtaagttggattcctaggtattttattctctttgaagcaattgtgaatgggagttcactcatgatttggctctctgtttgtctgttgttggtgtataagaatgcttgtgatttttgtacattgattttgtatcctgagactttgctgaagttgcttatcagcttaaggagattttgggctgagacaatggggttttctagataaacaatcatgtcgtctgcaaacagggacaatttgacttcctcttttcctaattgaataccctttatttccttctcctgcctgattgccctggccagaacttccaacactatgttgaataggagcggtgagagagggcatccctgtcttgtgccagttttcaaagggaatgcttccagtttttgcccattcagtatgatattggctgtgggtttgtcatagatagctcttattattttgaaatacgtcccatcaatacctaatttattgagagtttttagcatgaagggttgttgaattttgtcaaaggctttttctgcatctgttgagataatcatgtggtttttgtctttggctctgtttatatgctggattacatttattgatttgcgtatattgaaccagccttgcatcccagggatgaagcccacttgatcatggtggataagctttttgatgtgctgctggattcggtttgccagtattttattgaggatttttgcatcaatgttcatcaaggatattggtctaaaattctcttttttggttgtgtctctgcccggctttggtatcagaatgatgctggcctcataaaatgagttagggaggattccctctttttctattgattggaatagtttcagaaggaatggtaccagttcctccttgtacttccggtagaatttggctgtgaatccatctggtcctggactcttttaggttggtaaactattgattattgccacaatttcagagcctgttattggtctattcagagattcaacttcttcctggtttagtcttgggagagtgtatgtgtcaaggaatttatccatttcttctagattttctagtttatttgcgtagaggtgtttgtagtattctctgatggtagtttgtatttctgtgggatcggtggtgatatcccctttatcattttttattgtgtctatttgattcttctctctttttttctttattagtcttgctagcggtctatcaattttgttgatcctttcaaaaaaccagctcctggattcattgattttttgaaggtttttttgtgtctctatttccttcagttctgctctgattttagttatttcttgccttctgctagcttttgaatgtgtttgctcttgcttttctagttcttttaattgtgatgttagggtgtcaattttggatctttcctgctttctcttgtaggcatttagtgctataaatttccctctacacactgctttgaatgcgtcccagagattctggtatgttgtgtctttgttctcattggtttcaaagaacatctttatttctgccttcatttcattatgtacccagtagtcattcaggagcaggttgttcagtttccatgtagttgagcggctttgagtgagattcttaatcctgagttctagtttgattgcactgtggtctgagagatagtttgttataatttctgttcttttacatttgctgaggagagctttacttccaagtatgtggtcaattttggaataggtgtggtgtggtgctgaaaaaaatgtatattctgttgatttggggtggagagttctgtagatgtctattaggtccccctggtgcagagctgagttcaattcctgggtatccttgttgactttctgtctcatggatctgtctaatgttgacagtggggtgttaaagtctcccattattaatgtgtgggagtctaagtctctttgtaggtcactcaggacttgctttatgaatctgggtgctcctgtattgggtgcataaatatttaggatagttagctcctcttgttgaattgatccctttaccattatgtaatggccttgtctcttctgatctttgttggtttaaagtctgttttatcagagactaggattgcaacccctgcctttttttgttttccattggtttggtagatcttcctccatccttttattttgagcctatgtgtgtctctgcacgtgagatgggtttcctgaatacagcacactgatgggtcttgactctttatccaacttgccagtctgtgtcttttaattggagaatttagtccatttacatttaaagttaatagtgttatgtgtgaatttgatcctgtcattatgatgttagctggttattttgcttgttagttgatgcagtttcttcctagtctcgatgggctttacattttggcatgattttgcagcggctggtaccggttgttcctttccatgtttagcgcttccttcaggagctcttttagggcaggcctggtggtgacaaaatctctcagcatttgcttgtctataaagtattttatttctccttcacttatgaagcttagtttggctggatatgaaattctgggttgaaaattcttttctttaagaatgttgaatattggcccccactctcttctggcttgtagggtttctgccaagagatccgctgttagtctgatgggcttccctttgagggtaacccgacctttctctctggctgcccttaacattttttccttcatttcaactttggtgaatctgacaattatgtgtcttggagttgctcttctcgaggagtatctttgtggcgttctctgtatttcctgaatctgaacgttggcctgccttgctagattggggaagttctccaggataatatcctgcagagtgttttccaacttggttccattctccacatcactttcaggtacaccaatcagacgtagatttggtcttttcacatactcccatatttcttggaggctttgctcatttctttttattcttttttctctaaacttcccttctcgcttcatttcattcatttcatcttccattgctgataccctttcttccagttgattgcatcggctcctgaggcttctgcattcttcacgtagttctcgagccttggttttcaggtccatcagctcctttaaacacttctctgtattggttattctagttatacattcttctaaatttttttcaaagttttcaacttctttgcctttggtttgaatgtcctcccgtagctcagagtaatttgatcgtctgaagccttcttctctcagctcgtcaaaatcattctccatccagctttgttctgttgctggtgaggagctgcgttcctttggaggaggagaggcgctctgcgttttagagtttccagtttttctgttctgttttttccccatctttgtggttttatctacttttggtctttgatgatggtgatgtacagatgggttttcggtgtagatgtcctttctggttgttagttttccttctaacagacaggaccctcagctgcaggtctgttggaataccctgccgtgtgaggtgtcagtgtgcccctgctggggggtgcctcccagttaggctgctcgggggtcaggggtcagggacccacttgaggaggcagtctgcccgttctcagatctccagctgcttgctgggagaaccactgctctcttcaaagctgtcagacagggacacttaagtctgcagaggttactgctgtctttttgtttgtgtgtgccctgccccaagacgtggagcctacagaggcaggcaggcctccttgagctgtggtgggctccacccagttcgagcttccaggctgctttgtttacctaagcaagcctgggcaatggcgggcgcccctcccccagcctagttgccgccttgcagtttgatctcagactgctgtgctagcaatcagcgagattccgtgggcgtaggaccctctgagccaggtgtgggatatagtctcgtggtgcgccgttttttaagccggtctgaaaagcgcaatattcgggtgggagtgacccgattttccaggtgcgtccgtcacccctttctttgactgggaaagggaactccctgaccccttgcgcttcccaggtgaggcaatgcctcgccctgcttcagctcgcgcacggtgcgtgcacccactggcctgcgcccactgtctggcactccctagtgggatgaaccyggtacctcagatggaaatgcagaaatcacccgtcttctgcgtcgctcacgctgggagctgtagaccggagctgttcctattcggccatcttggctcctcccccctgaaaattattatttagagtacaaaatgatttgattttattttcttcctgtcaattatgccaacaacattcattaaaaagtgaccagctttttagatagacaacccagaacacaaatgcatcagatcaaaacccataaaatatagtgtgtaataataattatatatgttttattactttaacataaaaacatgaaatagtcatttatttaaaattatatattattctgtattatttatttttattacaaaatgctatataaacaacaggacgagttaacagggtcaataagtagtaactgatagtagtactaagtaaataatagatgtgacaaaagtataacaatattttaataaggttttttttctgtcctctgatacagcagttatttttaactctttgctgactccgtgctggatatttacatttgtagtgtgtatttaagacatataagtgtgaaactttttaaaaggggaacataaatactacaggactaatttaacagatattaactgtattaaataacaacagcaataacatgttcttttctgtccccaaatatagtaggacaattttactctttcttctccgataatacttcaatgaattgcctgtaatttttggggcttccttttcttttattcagttgtagaactgaatatagtcaaacataaaatgcactttggtgtgcaatgctgctcttatcaagcctgcattacgttgattctggtgtcattccaatgtgatgacaccaagctaaatatactcttaacaagcatttgactataaaatgagagttcaattattagcaataatgtttttcaactcatagaaattagttccagctctccaaaaagatgtccatactctttgattctacaagctttcttttaaaggccaggcttttgtcaatcgtctttgcatctataaattcatcatataagctaaatatatctaaggtgtccaccatttttaaacactctgaagcactttggatgttattataagtgaaatctctcttaggaaaatgattttaaagcacaagagtaatttgaattttgtgaaattggtgctagattctaaagttacagttttagtaaagaaatagagaaagtctttatagtagcatgatttataatcctttgggtatatacccagcaatgggatcactgggtcaaatggtatttctagctctagatcctggagaaatcaacacactgtcttccacaatggttgaactaatttatactccaataaatatgtacaattattatgtgctaataataaaaggccttcaccccaaaaaaaaaaaaaaaggaaattgaggaagttctgtgtaacttggctaccttgttgtggtgacttactgttttattttttatttttattgtttcgtagtaaaaaagttttgaagtagttgtatttttttaatgtgtcattgtttcactctgagtttttgttacaatctacacataccatcaaacaacacaggtgcagtcagttcatccttttttatactcctatggtttttttcaaaaatcatcaagcaagtttggaaatatagtatataaatttttattttactgtattcttttctgcattgtcactcaatgtatttccaaattagagaaggacatttcttcttgtctcacactttgaaaatgrttttatgatagtccaacattttagccattcatagtcatcttgtagtcatatgtctaaaggagctagttatctccttccatctctattaagtaaaaatcctcaagtttttctgcacattttgaggtaactgaaaagtgatcaaaaattttaattatgaaagctttaatatcacaggtaagcaatgttgtacacaagctgtgcagttcattttgcaggtaagatcttttaattttcttagataagaagtttatagactaaggccgggcacagtggctctcgcctataatttcagcacattgggaagccaaggcacgcagatcacttgaagccaggagctcgagacccgcctgtccaacattgcaaaaccctgtctctaccaaaaataatacaaaaattagaccagtgtgatggtgcacacctgtagtcccagctactcaggaggttgaggcaggaaaatggtttgaaccctggaggtggaggctgcagtggtctcagacgagctactgcattacagcctgggcaacagaatgagactctgttgcccaggctgtaataaatataaatatttatttttataaatatttataaaataaatattttattatatttataaaataaatataaaaaaaagtttatagactaaacaaaacttgcttaaatttacacttgcaatgtctatagaatatgcaggtagagggcaagtatctggacaaaatatcagtaaacttttgctttatgttttctgcagttttattaaaatattcataaaaatcagtgaggcgatcgagaccatcctggctaacatagtgaaaccccatctctactaaacaaaatacaaaaaattagccaggcgtggtggtgggcgcctgtagtcccagctactcgggaggctgaggcgagaatggcgtgaacccgggaggtggagcttgcgtgagctaagatcatgccactacactccagcctgggcgacagaatgagattccatctcaaaaaaaaaaaaaattcataaaaatcaagaagatgatttgaagctccatttttaaaataaaagtacctaaaagctagatgaatcagtttttgttgccattatttgacacaaaactttactgcagaaaacattcaagtaagatctgaaagaatcagctctatagagtaagaggccaayamgtctgttagcaaaattttgtccttttgttttcccacggcacattttatttgaaacctagtaatgaggaaaagtagcttcattccattttatagagctatcaggggaatggtacaataatgtatgtttcttgatgtggtatgcccaaactaactcatagccactgtttttaactgtgcattggtgtcttttgggagacacagaatcttttgattgatttagaagtattccctgtcttattccaaactatgagattcagtctgcatatgtgtttttacatcgttttcctccatcatacccaattgcaaatttcttttctgcagattgtgcagtagtttgtcttggttatttgcctccctgatccagttatttctgtccttccatctgtaataagataacaktgtcatttagccttatttttcagcgatattcgggtcatgctggcattggtattataatcattctcatttttattatctgaactctcagaaaaaaaccagtatcgaaagttaaattaacattatcttggtrtcgagatgataccaagaaaaccgttaatccacagacaaaggactgttaatactcatgaatacaatgtgcttaagtaacacacttaagcctcagcactcacagcagtgcaacaaggggtgattcattattgtgaacagcaaatcacagttgccaacatcagcagtcaggaggaaaaacagtgacagcaactgtgggaaacataatctatgccatatccatctgctacaaaaacagtgttgctttcagctattttttgagccgtggtatgggtttgatactacsccccctaaccttctgtacccattgccaaaaacctggatttgttgcctccctgaaagtttactcatgacatggggcttttgtgctatgactgggcattggaggcaaacctgggcaattgtcaccctagctcttcctattaagcttacatttatgagcatttccgtcaattcatctattcaatactttggttgagaaactggggctggattatttgttgtagcctcaaagatttttttggtctcacttgaatccagttaagtgctcttcttacttttctgttagaattgtaatcttccacactgctgtttccctggagtgtattctacttgttctaatttatttttccctttccgactgtggaactcactacatggattattctttttcttcgtcagctcatgaggattcaggtctagttgttgaagtagcctagggactggcagtcttgctaattgtagaaggtaaaatatcctctcttcctgtgggccagaacaaacaaggtgactccattcccctcctgagacacacagaagcagctaagggctctccagtcttctggtctgacccaaggcacaggactccaggatagggaggtctctgtccatccattcaactctttctggccagtttaaaggcaacagaacatgtatattaatggtaacaaatatctaaggaaggaagtccggaggacttgggagccacagatctctgtgaaccaagctttcctcaaacttagtttcttccttgccttccctgcaggttgcacttgttttcgcagacacacccagcctgaaggagagaatcaccagttcttttcccacatgctctacctagagccccaacctttctaaccttctgtcttccagagcccagcagccatttgtttcaagaaaaagttggcagcggagggtaaagaagctacattcagttttctattttcctagaatgcttttaaaaactttaaaaaatatatttagtattcctgataatctccaaaagaacaggcaagaaataagatttagaggtgggcataacacttcttttctaggttaaaaaattgatttttttwaaaaagttgatgtttattttaaatacattcatatattctttttgaaagtttgtgccctatgataactatgtcagagcacaaattaaaattttgacaaaataacagataaattatcataggccaacaattaaggtagcagtaaacaaaaccatatatattttaaagtcagtcttaagtacttaaacttgagtttgatcatgatttattgtgctgtataaattcagaagaattgatgaatgctgctaaattattaatttgcccaaagtgtgagaggctaccgcccagaaccatgtgttataaatattaaagccatcccatctttaggacttatgtgggcaatgaattataaggaccactgtaaatcaattctgggttaatcataactctttgcgcctgtgattcacaatcacattatcccccactgaccattagttaaaattggaaagaagtttgcagcttagtgggcaaggctagaatttatttccctcacattattctcaggccttttcatttttatttgatgaggaaaaatagattttcattattcaagctttattttaattttcaaaagctctgctttgtttcattcctaagaatcagaaatgcttagagagcaatggctacaaaatcaacaggcctcgagggtccagagtcatataaaccaaatattcattttttccaatgatcttgagaagtaagcaacctttttcttaaaagcccaatttttttttaccttaataccgtgatcatatagaactgaggaarctgcatgctttctgtggcccttgccgtaaactacatagcattatatttctttacgtaactgttgtttctcaaactccataggctataccttacaggcaaaggctattctatgtcacatgcttttgcattcctatggagaatctcccagaaatttatatttaatgtagtgcaaagagcataggaagatagccttgatctcacattccaaatctaccgcaaatcattggtatgacttagagcaagttacaattacctcacctgtgaattagatatcstatcagctgtctcacagtgttgtaaagaacaaataaatgtgtatgtaaatggcatttttagcagttgaaacatgtttggtaaatgttatctattatcataagaaataaatggaggacagagggaggattttctttagcaaaggaaattcctatctaacccttttggtttaatgtcacttttccataattgttcccactgaatgttttttaataagaaaggatcatcacttctgtgtctctgaagccatagattttggagtgagcttttaagaaatttactaaattaaagattcatgtgagaaagagtattgtcctcccgattcaaatcaaaattggtgagataamaggtagcgataagtctgtttgtggcatggacttctgtagttagtacaggaggctgctacctaatgaattaaaaagcaaagtgctttcagcatcagctcatgatggagatgtcagaacaggagcatacaggacacaagtaatctatatacaaatagaaatgtgtcataatccctaacatgttgaggaacataggtgcaggttttgaaaatgcactttcccattcttcactttacttggcaagaaatgcaaatattcaagaaaataacattgaatatttacagttcttcacctgacaaatggaaaatttcaaaaarttttaggctagaggaatgtgcataaacgagaaatggtctccaaagcatatctatgttttcaattggttaggtactattgataaggaatttaaatatttggggttttcttatacagctatttcagttaccagaatatttgagacttgtcctgattccttccaacaaaaattaatttcccttttcttttacgactttaaacaaaatctgttcatatgatccttaccataatgtgattcgtgttacaacaattttgtacttgacttatctccactactgagttgtaagcagcttgatgatgggggcccaagtcttacctttatattccttatagacttaaccttcaggattttagagttaatgtgtaatgattgttagtaaaattgaatttaaacaacaactgttaaagaaaaatatagaaatgggaacaaaacctagctcctagtgttatctgggaagtgagaaatttatcacggggagtctattgatatctcaggcactattacgaggacacaggtgctgagcctcaatagttaccaatgtcaatcaataaccatagcatcctagcatctctactttggggtctggagattgaaaacactagaggtagatatcactttggattatttttcttcctcataatgagacctggaatatgctgacatgaagctcccagattcacttttgctttcttctgtttaacctagtatgaaggactctgctggtgtggaatccattagtaaataaatcaatggcatgtgattcagttgcctgtctaaacatggcctcaagaacagggctagttgaaaaattttaagaaaactccattacctagtcagatggattgaaaatttttaggccagtccttcaattattattctgttgaaaggtgacttcagactttgttgatgagtattttatagagttttcatttgatggttaaagaccattcaaaaggcagtgattatatgttttaattgatgaaaaaggccagggccatttttaaaagctaaaatagtttgggttactatgcaacctttcattgccattgctacaggctataatcacactgttttaatgattctctttttaaaaatccattcataattctttggaacattagtattgcaagagacagcatatataatggcaaggataatgttactatacatttaagtagagctctacagttcacaaagcattgacaacaatgctagaaaacttttctaacagcaaagcaatatgtcgcctactggggaggtcccttgaggtttgtaaagaagctgccaggggatccaggaggccagactaacagtttaaaacagaagataatcayaaaaatcaaagtaggttgttagaggaagcttcaaggtcactgctactcccaatcactgtaaatttagacctagggagctataagcaggtctgcaagttggttgcaaagatcagagaaaagaaggaaactatggrataactctgtgggtgagaaatcaatgcagacgaaacctaaccaagtgtttttccttctctcacactaacactccaagcatctcctagttttataattatatcaagccccacgtatataaaattgtttccgatgatattactcatttttttatcatcagcatcattagtaataaaaaagtggtgtgcataagctgtcaggattgttaaaatgcatactcccaggccttaaacatcaaacatcatcatgcagtaactttgggattagatctagaatctacatttctaacacaaaaatcccctagtaattctaatggtggtagtcttcgcatcacattgtgagaaacactgaccgatagcacctaaactagggtctagggtaccacagacactccatgagtaatacttgaattaaatgctttctttagggaaaaaacttttgtctgtttcaatacctcatggtttggttggggttcacctcaacaaaagacagtaagtatccactgagcacagttaamtggactgaaggttttaggccattcattgtttcatacaaaactttttattgggtatccaatattggtgggatctaagcaaatttattaaaaggcaacaattaaatatttcttctatatttgcttcctttacctttatgttttgatattccattcttttttcagtaccaaaaaaagtctcgcatgttcttctagtttttcttttcttaaaacttggtctttaaaaaattatatttaatttattccactacggaaatttattttgtgtgatgtgacatagtgctctaatattgacatttttgcaataatcacctgtctcacgttttttgaatatttcatatttrccacactgatttgatttatcgactttctaatacagtcttttttttaaagagaggtaaaagttttatgatggcagatgattcttttttttattattattatactttaagttctgggatacatgtgcagaacctgtgcaggtttgttacataggtatacacatgccatggtggtttgctgcaccaatcaacctgtcacctacattagatatttctcctaatgctatctctcccctagccccctgaccccccaacaggccctggtgtgtgatgttcccctttctgtgtccatgtgttctcattgttcatgtggtgtttggttttctgttcctgtgttagtttgctgagaatgatggtttccagcttcatccatgtccctgcaaaggacacgaactgccagcaattccattactgggtatatacccaagggattataaaccattctactgtaaagacacatgcacmtgtatgtttattgcagcactattcacaatagcaaagacttggaaccaacccaaatgtccaacaatgatagactggataaagaaaatgtggcacatatacactatggaatactatgcagtctaatacagtctttatataacatttatatacttttaaaaacagtaaacttttgttctgttccactgattttctattcttaaatacattttgtactgttttatttttaagctttataacatgtctcattacttggtattctaagtctctgataattattaattttttaattttcaaaatttcattactattcttgtctgttttctcctaattaaatttgcaaaggtcttaagaggttctaaaataaccttcaggcattttatttagaattacattttgtattggagaatctgaggaaaatttaaatgtcttttgtaattwtgcatctgcattcttaggaatatgttatgtctatacagaaacttgttcaagttgtcttcagtcaggtgttaaggtattcttcatatagctcctactaatttattgttaaatttctctctatgtatttatatttaatgtacatagatatttttactcaaactatcatctcattaatatattaatagaaaagcaaatcatttgtatatatccatttatgatcaatctatttttttaatctgaatttttaaaatactttttcacttgattctggtgggcttcttgaatatatcatcaaataatgataattttgtctctactggatgataattttttcctaatagattgcaatcatagttttgtttccatccttttttgcataggataaagttgttacaataatgttaattttggattactagcaagcataattttctttactttaatggcaatgcaaagagagtttaagcttgtaataggcttgctgttgtttgaagtattctgtatctcattacggattttttttcttcctggtttaccaatagatagataacaggtagacaactgtttataattttgccaagtatctttcttgtgtctattgaaagatcatttaaaaattttataaagcctcatttgtaagatatgttgtcaccccagtaacatttctaatactgaaccaatgttgcttttccttgtttaataatgttacattattcttttaatataagcaaactaaccttggagtttaactattacttctatttattttatgaatttcttaagtccatttttatatgtgaaaaagttgaaaatataccttattgagatgtttaggatagtaggttgggcttttattgggtaaatttgtgacttagtgtatgagtgattactgaggggaaaaaaaataatcactaaagacattgtaagtgaaccagagtaaagttgtgttccttaagtgatgatagaggaggttgtggaatcgttttattttcctcattgcaatgcccaccagggagttttcttctaagttcagctgcaagatatccataggccacatgtgacaatagattaatttagaaggacacaggacaggagatatagctcatcagcagggcagcattgtcattttttcttcaatgtgagttgtacttgcagctttcatttagaatagggatcacatgcaagatgatacctatactgagtgagtacagaagcccacctggcttagaagcctagtaacccaaggcgtcagtagctcttgtcataaccccaaaggcatagctttcagggtccccagaaggggcagtcccagtcacatgaatcactgaactggtagaagcacaaagacatggcttcctttcatgcattttttgttctctcaatccaaatgacattttccactcaggggtcattttactataagcaacgtggcctaaaagtatagtaaacattcgacctttcccatgttttcagaacagagatataaattaaccaaagtacaaattctcattcagaataaaagcttacttagaaatacagtctgccctccatatctgcaggttctgcatgtgcagattcaaccagccatgaactgaaaatatttttaaaacacaatagagagtaataatataataaaaatacaaatgaaaaacaatacagtgggccgggcgcggtggctcacgcctgtaatcccagcactttgggaggccgaggcgggcggattacgaggtcaggagattgagaccatcctggctaacacggtgaaaccccagctctactaaaaatacaaaaaattagcggggcgcggtggtgggcgcctgtagtcccagctactcgggaggttgaggcaggagaatggcgtgaacccgggaggtggagcttgcagtgagcggagatcgcgccactgcactccagcctgggcgacagagcaagactccgtctcagaaaaaacaaaacaaaacaaaacaaaaataaagcgcaacaactgtttacatagcatatgtacattgtattaggtatcataagtaatctagacatgatttaagtatactggaggatgtgtagagattatatgcaaatactatgacattttatataaggacttgagcatccctggattttggtatccacaggggttctgaaatcaatccccaacagatactgaaggatgattatatgttctattatttttagcataattaaatatataccaatgtaatgtttttcatcctgtgtatgtaaattaaaattccaactttaaaccctatttcttcttttgttcttcattttttcacaggtaaaatatggaaattatgctttcgtatgggatgcagctgtattggaatatgtggctatcaatgacccagattgttccttttacaccattggaaatactgttgctgatcggggatatggaattgcattacaacatggcagtccttaccgagatgttttttcacaaaggtaagatttgtgtatgaccaaataaggggagagatgaaatttagacaaagaatatccatttggttaccagatctggtttattacattttgtttcctttgttaggagaagcacaataaacaacaacaacaaaaaagatagttataagtagttgttcaataagacactcattacctaaaacatgaagtattgttttttccataagtagcgggaaaaataatgctacatataactggttttactctcaaaaaattgacatggaaaagaaagtaggtgtgttagtaatttctattagaattaaactagtagtctagtctgaatttttagcaacaaatgtcacagagttaagaaaatgaattcattctgaggatacaaaagcataacataaacttcaggaccaagttaaagctctgatggactgaagcagataatgacagggatgtttccacctgaatttttcaaaggaaatggttaagattttggagttccccgcttaacatcaaagtatatgtgagattttgtcatggaaatcaaggagataacttattgagacattatatccattttcaaatcagaatttctatgatgaaggagttgtttacaatggaagatttttaaatatatattttagattaacaatgcatatgaaagacttgggcctcaaaggagtgcacaaagattactgcatttcattatatctcctaccaaacaagcttggacctaagacagattaatatcttccacatagaagtatatccattttatactgaaagtacattttgtttattttctagattttcttctacctattctctagaatctaatgacagtccaagaggacagttccagatagtactaaggccctaaatttcaaacaacttgagttatatttctccaaattttaggataacaaaaaatccaggcattttgtgtgtatgtttttttttaaaagaactaaaaatcagtagttcacaatttgtgtcataactcttccattagcaaaccataaaaatctaaacctctctcatgacatgcaaaatgaagttagattaattctaaggtcctgtactagtcagcttttctgtgtagcaaacaactctaaagtataagtgatttagaaaagttacttctcattcatgaaacaaggctgtaatttggttgtgttatgcttcaagctgtgggtcaactgcagkcctactctgtgcaagcttctcattccaaggcccaggctgaagaagccgacctaacagggacatgctgttctcattgcaaagagcatttgtaaaagaggctggcagaaacctgcagtgcctcctgtgtttcttgcttggatgtggcatatgttccatctgcccacagatcacaaaccaaagcaagtctcatggccaagcccaaaatcaatagagtgggtaaatgtaccccacatatagggaaggaaggagtaaaggattatgaataggctggacgcagtggttcacacgtgtaacctcagcactttgggaggccaaggcaggtggatcacttgaggccaggagtttgagaccagcctggccaacatggagaaaccccatctctactaaaaatacaaaaattatccaggtgtggtggtgcatgcctgtaatctcagctacttgggaggctgaggcatgagaatcgcttgagcttgggaggtggaggttatagtgagccaaaagtgaaatacatatgcattaactgggaagcaaaatactaaataataatcaatcaaaatacatttattgacgagcaaattctaagaggaacaaactacaaaaatcaattatgccatagggaatccgtctgtaaagcacttggcatctagttggagatataagacccatgcacaagaaacaaagaacaatatagacatttctataaatgtgtgttgatatatatgtatataatatcagtattatttatttatattattttaaattgtgtagttaaggtactgaaataattgaacagcatacagagtagttaagcaaaggaaaatgagtgaaagctctccagagaaggtaagcctggaacttgaccttgatggggcaaggggaaatacggagaaggaacaaatagaagagacccttctaagggaagaaacacaccactgcttttaatttagttgtgaggatggaaaagcataatagaatgaaaagggatccagggtttcatggtaaaagaccagcagaaatgtttaatgcatgcttaacattacagagctagttgagaaaaggattattgattattgattagttatggttaattggctttttcattgctaaagatgttcttgcttttcagacttgattttctggctttttttttttttttgagacattgtttcgctcttgtcacccaggctgcagtgcagtggtgcgatctcggctcactgcaacctccccatcccgggttcaagtgattctcctgcctcagcctcccaagtagctgggattacacatgcacgccaccatacccagctaattttttgtatttttagtagaaatggggttttgccatattgggcaggctggtcttgaactcctgatatcaggtgatcctcccgcctcagcctcccaaagtgttgggattacaggcatgagccaccgcgcccagcgattttctggattttttatgtaaaaaataatgcatgaacgtaatagtaattaaagaaatgtttaataaatcacaccaagtgttgcatttcttattagccctgcagtgctttacctatcagagattttaattctcagaaaatgtactctagtgaactgctaaaaagtattattaagcattaagcattatttttcctttgtttgatatgcagtacagatgttggcagtttaaattktttctttctgtggagtttcttggtaaygacaccctgcatcctgattccctggacatatggagaaaaggagagccaggaaagaagcaggacctggcgatcatcagtgtgccagctcctctctttatacacatgtgccacattaatttatcacccaaaacctctcgctaaattcagaaaatatttgcatttgttccatttttttatagccataaggaaaaagagatcttccctttctgttaactgattttaaaaattataaagatcatcaaatttaascattttagtacactgtggtcagtatgttttatacatcagcatccggggccattgatattacatattactattgtgattattttcactgaaaatatagtatactaggtgatttttaataattcaatattacttttcaggtgactatatttctataacacaacttctaaaatattaagttactttaatatgtaataaatattagtatgtaaaataaaaaatatatagtgatacagtaactacatttattatctgctacctgccagacgtcttatatgtttatatatttcataggcactttagaacaatcatatgaggcattgcacatttgttcattatagcattgcttattagtgcatgactgctatgctacaagtacatacactgagtggatgagtctgcacctggacaagcatcaaattcaggttcggagacatgggttatatcaatacactcacatgtatgattgtatgtgagcgaacacacattggaatgacttcaaggaaccagtaagtgctagaatttatataaccatagaaatggctagaagagttttgcttccttttgtgtcctttctgcacataaactagataacttggcagcagaagttaaagtcagtctttttttttggtcatcagatgtgtgcgtgagtgtggtaagtaaggcttgcagtgaattctctacctgacacgatttgtcatcagatgttttatgtggttctcatcttgtaacttcttagtttaaaaacatttagtcatatgttgyctcattaaaggcattcaagaatgaagaaaactgaatttttcgggttgacttcattgtgcaataaataaagttaactccagtgttgacttcagaatcttaacaatgcagaaagctaaaaagataaccaaaaagtatgagctcaagtctattctcaaatcttaagtggatattgggaaaaattcattagtttaattttatagttcatccataaagaggtcacattttgcttattggcttctagaccctaaacttgggatatagaactacccaaagtcacaaaaacaattacgtgttccaagttgcatggagaataatttttcttagattcatgatagtgacacatatataaacagttgttcaaactaatcgcagaatttgagaatttttagaaatggaactaacagtagctatgccctttctgacagggatgaaagtagtccacaggaataaacaacttgcttagaatcacaaaaaaaagcaataaaattggaaaaaattcaaaatttctgatttcatatccagttttctggtcactgtacattctgtcttcccttatatttcttctaaaagcatataagaataatgtcaagcttatattcttatattgtccttactatatgctagactctcagctactacacataataacccgtgaggtaaatactgttgctgtcctaattgtacagatacagaaactgagacatcatgaagtaaagtaacttgtgcaagttcaggaagctgtcgattattagagctgagactcaaacccagagtctggctccaaaaactgggtctcttaaccattctgctatactgcttttcacaaaaatgacacacacttttaacaagtgtgtttcaaataaacacttagggattctctttttttttttttattatactttaagttctagggtacatgtgcacaacgtgcaggtttgttacatatgtatacatgtgccatgttggtgtgctgcacccattaactcatcatttatattaggtatatctcctaatgctatccctccccactccccgaccctaggacaggccctggtgtgtgatgctccccttcccgtgtccaagtgttctcattgttcaattcccacctatgagtgagaacatgcggtgtttggttttttgtctttgcaatagtttgctgagaatgatggtttccaccttcatctatgtccctacaaaggacatgaactcatccttttttatggctgcatagtattccatggtgtgtatgtgccacatttccttaatccagtctatcattgttggacatttggcttggttccaagtctttgctattgtgaatagtgccacaataaatatacgtgtgcatgtgtctttatarcagcatgatttacaatcctttgggtatatacccagtaatgggattgctgggtcaaatggtatttctagttctagatccctgaggaatcgccacactgtcttccacaatgattgtactagtttacagtcccaccaacagtgtaaaagtgttcctatttctccacatcctctccagtacctgttgtttcctgactttttaatgatggccattctaactgctgtgagatggtatctcgttgtagttttgatttgcatttctctgatggccagtgatgatgagcattttttcatgtcycttttggctgcataaaagtcttcttttgagaagtgtctgttcatatccttcacccactttttgatgaggttgtttgttttttccttgtaagtttgtttgagttctttgtagattctggatattagccctttgtcagacgagtagattgcaaaaattttctcccattttgtaggttgcctgttcactctgatggtagtttcttttgctgtgcagaagctctttagtttaatgagatcccatttgtcarttttggcttttgttgccattgcttttggtgttttagatatgaagtccttgcccaggcctacgtcctgaatggtattgcctaggttttcttctagggtttttatggttttaggtctaacattgaagtctttgatccatcttgaatgaatttttgtataaggtgtaaggaagggatccagtttcagctttttccatatggctaaccagttttcccagcaccatttattaaatagggaatcctttccccatttcttgtttttgtcaggtttgtcaaagatcagctggttgtagatgtgtggtattatttctgagcgctctgttctgttccattggtctatatctctgttttggtaccagtaccatgctgttttggttactgtagacttgtagtatagtttgaagtcaggtagcgtgatgcctccagctttgttctttttgcttaatattgtcttggcaatgcgggctcttttttggttccatatgaactttcaagtcgttttttccaattctgtgaagaaagtcattggtagcttgatgcggatggcattgaatgtataaattaccttgggcagtatggccattttcacgatgttgattcttcctacccatgagcatggaatgttcttccatttgtttgtgtcctcttttattttgttgagcagtagtttgtagttctccttgaagaggtccttcacatcccttgtaagttggattcctaggtattttattctctttgaagcaattgtgaatgggagttcactcatgatttggctctctgtttgtcttttactggtgtataagatctctttctatctctctctctctacacatgcatgcatgcacacacatagacacacaaagagtagaacaaatcacaatccttggtacttcacaatactctcataatgggtccataaatagctacttttattcatttatttgattagttttatactccttagttgtagtcttttttcctataaactattagaatatttaatttaatattataactataagaatttttttcctattaagtattagaatatttagtgctttactttgtatttttacaagtaaaaatacaaattattcaaaaaattattcaaaaagagaacattagatctttttacctctctctatcttgatacttcttacactttacctcttgtttcctacctcctgttggaaagctcctgagctccttgagttcacacgtgtgtttgtacatctctagtgcccactttcttgtttagcatgcagtaagcattcaataattatttcatacatgaataaaagatctacttaactttttggctaaagatcagcccatttacttacagccagataaacctctgtgcattttgcttgctkgataatttctaaagtcttccttcttatcataattattttttmtttcttggtttctataatttttcatccaaccaataaaaaagctaagaaaaaaaatctaagaagaaaaagaaaacaaacacagcacctgcctacccttctttccaactccctgytgtaataatttttatgctttttcccacaaggaaagtaaaaaacattcctttaacttgacagcataatcctaatcctttaataccccaattggaatggggtkctttccaagcattctgttcaccattcagcaaggggaaaaaagcagcccccattgattgcccacttagtagctccaggattggtcaacaaatggcttaagctctgtattcagctggttaaaagaatctctcagaaaggtacataaaaccagaagttaaacagttaactggcttccctttagagatgcaaaatataaactagccccaagctctgagagcagaagtgacattattgagacacatttgtaaacattaagcaatatcaaagtatacattaaactatatagtatagacaatacttgcaggaaaaattttaaggaaaacaaaatcagtgaaggttagaataaaaatggttactagacttgagcagggagaattcaaaaataaatcgaatttggatatgagagcaggtgcaggtaaaatactcaggaaaacatgagagattcacataaataaaaacggccatcatgtgttgaaaggatgatgagaaggaacaacttcactggaaataatattagttgagggatttaggtagagaaactaaaattgaatgtgatagactatcaacagctgctagttataaagcatctactacactaaacacttgatatgtttcatataatgcttgccacaactctgtgcattgcatttcataaatttgaggaaactgagcctcagacttaaatatcttgccaaattcacacaactaataacaaacagatctaggcctcaggttgaagctcgtgtccttatgcagcaccgtycaccagctttgtggggctctgagaagagaaatatctgtacagasgaggatttgaggagtctgaggtgttaggttagcttttaattgaagaaggccatttgcaagtattctagctgggaagcagtaagaatactacaaaagaattaggaaaagggattagaaaaaaagataagtttggagaaaggatagggagaacttggtgaaaaatcaaagaagtgcataaaatccaggaccctgaacaagaaaggctatgcagatttaaatggcaacaaacagccccctcttttctcctacttcttccagctgtcttacttctccttttcttggtcatctattacaagtttgcatyagctgtatttcatcatttttagaaaggcagtgattatttattttaattatgatcatttactacccggtaaataaataattatttctaagaaccatacaacctacagatttctattctgttgttgctcacatcacagtaacatattcctattggtattgttcttctctctcacaatacatcagacttttttttaatttatatatatgttttatttaattttatgtgtgtatatatataccactaacatcagctggtttcattgtatccacattttctgttccagatcaagaaaacaagataattaagatgggcagataattaagaaaggagaacatttgaagagtctcaaaataaaagcaagaaagaggacactgaaggttcactctcaaagggagacaggagtaggatgctataataatatatatattatatatatttatacatatatttttgctttaaaagaataacattttatgctataagatgtgaaaggaaattgttttcttttctcatataatacacatctatttagataaggactagcctctggaatccatacaaaggaatatgctattcctatttcagagcaacctcctctttaaaacatctgttttgaattgaggatttttaacttaaagaacttcaataaacaagaaaaatgagtaagcttttgtctatcattctttttctgtttcctgaatccttgtggagctacttttatgacggatatcctatgagttttagcaagcaccctgactgctacttctagtggagaatccaaataatttacatttattttagagtttagtctaaatagatgacagaataagtatagttagtgatatttccagtatgtgaatttttcaaaaatatttatgggctccatatgatttgagattagttttattagtcttgccaaactgtagccaaattttaaacaattataaacctttactctcaagaagcatatagcattctcactgctaagcacaaacctagacatcaaacagcaaccccatggggtagatttttaagtgatacaaatttccattcttcttgcactacatcatacagcattcagggaacactatattcaagatgcaacagtacccttaatgaacaagcatctttattagatttttctgagataagtcctgagctacagggaagataaatgactagtgcaaggtgcaaggcagtatttcagctggataataagcccatgatgctggaccaagctgcttttcaagcagcaagtctgattagcctttttacaaataagatttgtgctgtttctagatctcagtaaatattgtttattcagaaacccattggtttacaaaaagcatagttattttactgatataatctaggtgttactaaaggctttttaacaaaatattccagaacttaaaaccacaaatttacactgcacttgaaaatacacacacacacatgcgcacacatacacacgcacacacacatactctccagagtaattataagactctctccaaaactcttttattcccttatagttaaatcacatttttaacaytcaaaacactcattctactcaacaaacataacgtcaagacactttttactgtttgaaaaattcagtctacttttaaaaggaaaatttgatgtcatcaaaaataatcaaagaacatgctactttttcataggtccttaaaatattgtaaacatagtgacatcatgggaataaacgtgtgggcttacataataattatgtctatagaggaaacaatcatagattttgagcactgagtgagcctttggcatgcatttagataactctctaatttttcaaatgtgaaaccaagaagggaagtggggtgccctgcccagagtataacccttggttaaaaccatgccctggagaccactagtccaggctcccagtccagtgtcccatcccctgccctgttctgccagttccttttgtttaaaaaagtcagtttttatccctaaaatttaccagtaaaatatatgttttcacaaacatagtcatgtcaatatattacataaaagagcaggaatattcattaggaaatactttcaacagggtcacaaacataactagaacatctgtttaaaaattgtcattacttcatagacacaagaaaatgtagcacaaagatgaatagagtgctttggaatgtgttctctaacttataaagaaactatgctgtagactaaaatagtagtcgacattcattgaaaactcaccaggtgccaagtatcactataaaggccctaactatgttaaataatttaattctcacaataagcttgtgaggtaaatattattagtagctttattttatagaagaggaaactaaatcacagaaatgatttgaaattttccaaaatcctaaaactgataagtgacaaagccaggctttgaacccatgctgtcaaagacaatactatcctggctcatattcccacaagtctaagaacatgcaccagtgctggaaaaggataataaggatctaaattgtcttcatgactgccgacatggctgtcttccttcatattaaaatgctgttgggcattttagtttaaatgaaatgcagaatattttcagaaacttaaatggtatgccaataacaaagggtcctccattacagggagggagagatccatctgaaattgaaactgtcttgcatcagctgaccagaagtaaatatatwgaaaattgaaagctatgggacgatactgaaatattttcccttcctctcatcttcttttgctacaagttagtttaagactctacttaatcaaaactttaattcttccttcatggaagttttaattcatcattacattttaattggtggaattcgtaattgcctcttatctatcccatttcatagttctttgagcagctcaaataaactaacatcataattggtcagacagtctactcacatgttaaacgtttactaatatgaaacagaatctgatacttctagacatgaattattactaagataaaaatataagaatttttatatggaataagagtcattattctatatagcccaggtaagtctaacataagctctaacgatttctgtctttgtgaacgtagttctctgttttaataccaatttcaaatagagaaatatgtacctcaatgtgttcatttacttttttcataataatccattctgcttctgtcattttataaagctctttattttttaaatgttagtaactaatgaaaatgatcaaaatcaacatgtttttattttgtatgttgctgcctaagaaaacatatttaaaacttgcatcttttttttttttttttttwattatactctaagttttagggtacatgtgcacattgtgcaggttagttacatatgtatacatgtgccatgctggtgcgctgcacccactaatgtgtcatctagcattaggtatatctcccaatgctatcccacccccctcccccgaccccaccacagtccccagagtgtgatattccccttcctgtgtccatgtgatctcattgttcaattcccacctatgagtgagaatatgcggtgtttggttttttgttcttgcgatagtttactgagaatgatggtttccaatttcatccatgtccctacaaaggatatgaactcatcattttttatggctgcatagtattccatggtgtatatgtgccacattttcttaatccagtctatcattgttggacatttgggttggttccaagtctttgctattgtgaatagtgccgcaataaacatacgtgtgcatgtgtctttatagcagcatgatttatactcatttgggtatatatccagtaatgggatggctgggtcaaatggtatttctagttctagatccctgaggaatcgccacactgacttccacaatggttgaactagtttacagtcccaccaacagtgtaaaagtgttcctatttctccgcatcctctccagcacctgttgtttcctgactttttaatgattgccattctaactggtgtgagatgatatctcatagtggttttgatttgcatttctctgatggccagtgatgatgagcatttcttcatgtgttttttggctgcataaatgtcttcttttgagaagtgtctgttcatgtccttcgcccactttttgatggggttgtttgtttttttcttgtaaatttgtttgagttcattgtagattctggatattagccctttgtcagatgagtaggttgcgaaaattttctcccatgttgtaggttgcctgttcactctgatggtagtttcttttgctgtgcagaagctctttagtttaattagatcccatttgtcaattttggcttttgttgccattgcttttggtgttttggacatgaagtccttgcccatgcctatgtcctgaatggtaatgcctaggttttcttctagggtttttatggttttaggtttaacgtttaaatctttaatccatcttgaattgatttttgtataaggtgtaaggaagggatccagtttcagctttctacatatggctagccagttttcccagcaccatttattaaatagggaatcctttccccattgcttgtttttctcaggtttgtcaaagatcagatagttgtagatatgcggcattatttctgagggctctgttctgttccattgatctatatctctgttttggtaccagtaccatgctgttttggttactgtagccttgtagtatagtttgaagtcaggtagtgtgatgcctccagctttgttcttttggcttaggattgacttggcaatgcgggttcttttttggttccatatgaactttaaagtagttttttccaattctgtgaagaaagtcattggtagcttgatggggatggcattgaatctgtaaattaccttgggcagtatggccattttcacgatattgattcttcctacccatgagcatggaatgttcttccatttgtttgtctcctcttttatttccttgagcagcggtttgtagttctccttgaagaggtccttcacatcccttgtaagttggattcctaggtattttattctctttgaagcaattgtgaatgggagttcacccatgatttggctctctgtttgtctgttgttggtgtataagaatgcttgtgatttttgtacattgattttgtatcctgagactttgctgaagttgcttatcagcttaaggagattttgggctgagacgatggggttttctagataaacaatcatgtcgtctgcaaacagggacaatttgacttcctcttttcctaattgaataccctttatttccttctcctgcctgattgccctgtccagaacttccaacactatgttgaataggagcggtgagagagggcatccctgtcttgtgccggttttcaaagggaatgcttccagtttttgcccattcagtatgatattggctgtgggtttgtcatagatagctcttattattttgaaatacgtcccatcaatacctaatttattgagagtttttagcatgaagggttgttgaattttgtcaaaggctttttctgcatctattgagataatcatgtggtttttgtctttggctctgtttatatgctggattacatttattgatttgcgtatattgaaccagccttgcatcccagggatgaagcccacttgatcatggtggataagctttttgatgtgctgctggattcggtttgccagtattttattgaggatttttgcatcaatgttcatcaaggatattggtctaaaattctcttttttggttgtgtctctgcccggctttggcatcagaatgatgctggcctcataaaatgagttagggaggattccctctttttctattgattggaatagtttcagaaggaatggtaccagttcctccatgtacctctggtagaattcggctgtgaatccatctggtcctggactctttttggttggtaaactattgattattgccacaatttcagagcctgttattggtctattcagagattcaacttcttcctggtttagtcttgggagagtgtatgtgtcgaggaatgtatccatttcttctagattttctagtttatttgcgtagaggtgtttgtagtattctctgatggtagtttgtatttctgtgggatcggtggtgatatcccctttatcattttttattgtgtctatttgattcttctctctttttttctttattagtcttgctagcggtctatcaattttgttgatcctttcaaaaaaccagctcctggattcattgattttttgaagggttttttgtgtctctatttccttcagttctgctctgattttagttatttcttgccttctgctagcttttgaatgtgtttgctcttgcttttctagttcttttaattgtgatgttagggtgtcaattttggatctttcctgctttctcttgtaggcatttagtgctataaatttccctctacacactgctttgaatgcgtcccagagattctggtatgtggtgtctttgttctcgttggtttcaaagaacatctttatttctgccttcatttcgttatgtacccagtagtcattcaggagcaggttgttcagtttccatgtagttgagcggctttgagtgagattcttaatcctgagttctagtttgattgcactgtggtctgagagatagtttgttataatttctgttcttttacatttgctgaggagagctttacttccaagtatgtggtcaattttggaataggtgtggtgtggtgctgaaaaaaatgtatattctgttgatttggggtggagagttctgtagatgtctattaggtctgcttggtgcagagctgagttcaattcctgggtatccttgttgactttctgtctcgttgatctgtctaatgttgacagtggggtgttaaagtctcccattattaatgtgtgggagtctaagtctctttgtaggtcactgaggacttgctttatgaatctgggtgctcctgtattgggtgcataaatatttaggatagttagctcctcttgttgaattgatccctttaccattatgtaatggccttctttgtctcttttgatctttgttggtttaaagtctgttttatcagagactaggattgcaacccctgcctttttttgttttccattggcttggtagatcttcctccatccttttattttgagcctatgtgtgtctctgcacgtgagatgggtttcctgaatacagcacactgatgggtcttgactctttatccaacttgccagtctgtgtcttttaattgcagaatttagtccatttatatttaaagttaatattgttatgtgtgaatttgatcctgtcattatgatgttagctggtgattttgctcattagttgatgcagtttcttcctagtctcgatggtctttacattttggcatggttttgcagcggctggtaccggttgttcctttccatgtttagcgcttccttcaggagctcttttagggcaggcctggtggtgacaaaatctctcaacatttgcttgtctataaagtattttatttctccttcacttatgaagcttagtttggctggatatgaaattctgggttgaaaattcttttctttaagaatgttgaatattggcccccactctcttctggcttgtagggtttctgccgagagatccgctgttagtctgatgggctttcctttgagggtaacccgacctttctctctggctgcccttaacattttttccttcatttcaactttggtgaatctgacaattatgtgtcttggagttgctcttcttgaggagtatctttgtggcgttctctgtatttcctgaatctgaacgttggcctgccttgctagattggggaagttctcctggataatatcctgcagagtgttttccaacttggttccattctccacatcactttcaggtacaccaatcagatgtagatttggtcttttcacatagtcccatatttcttggaggctttgctcatttctttttattcttttttctctaaacttcccttctcgcttcatttcattcatttcatcttccattgctgatacccttccttccagttgatcgcatcggctcctgaggcttctgcattcttcacgtagttctcgagccttcgttttcagctccatcagctcctttaagcacttctctgtattggttattctagttatacattcttctaaatttttttcaaagttttcagcttctttgcctttggtttgaatgtcctcccgtagctcagagtaatttgatcgtctgaagccttcttctctcagctcgtcaaaatcattctccatccagctttgttctgttgctggtgaggaactgcgttcctttggaggaggagaggcgctctgcgttttagagtttccagtttttctgttctgttttttcaccatctttgtggttttatctacttttggtctttgatgatggtgatgtacagatgggttttcggtgtagatgtcctttctggttgttagttttccttctaacagacaggaccctcagctgcaggtctgttggaataccctgccgtgtgaggtgtcagtgtgcccctgctggggggtgcctcccagttaggctgctcgggggtcaggagtcagggacccacttgaggaggcagtctgcccgttctcagatctccagctgcttgctgggagaaccactgctctcttcaaagctgtcagacagggacacttaagtctgcagaggttactgctgtctttttgtttgtctgtgccctgcccccaaaggtggagcctacagaggcaggcaggcctccttgagctgtggtgggctccacccagttcgagcttccaggctgctttgtttacctaagcaagcctgggcaatggcgggcgcccctcccccagcctagttgccgccttgcagtttgatctcagactgctgtgctagcaatccgcgagattccgtgggcgtaggaccctccgagccaggtgtgggatatagtctcgtggtgcgccgtttcttaagccggtctgaaaagcgcaatattcgggtgggagtgacccgattttccaggtgcgtccgtcacccctttctttgactcggaaagggaactccctgaccccttgcgcttcccaggtgaggcaatgcctcgccctgcttcggctcgcgcacggtgcgcacacacactggcctgcgcccactgtctggcactccctagtgagatgaacccggtacctcagatggaaatgcagaaatcaccgtcttctgcgtcgctcacgctgggagctgtagaccggagctgttcctattcggccatcttggctcctccccactaaaacttgcatcttaatgatatttttaccaatgttccatgagcaatgtccatggcatgacagaaaggaactggcacgctaaaaaaaatcgtgagatttctactctgtaaggtttttaatctttatccaaaatagtggttttgatagtaaaatttttgttctgatgatttttctcaattttctgtgtattttccattaatgaaccaagatccctttagtactccctaaaaaaaccatcgtggcccttctagggagcctcttatattcttggtgctaatcagcatgaattttactagtattaatttcctcttttctgcatgtttttagcaagtgcagaaatttgccaaacaaattacttcttaaccagaatgtattcagtaaagtgactcaaaatcattcattaaggtagatgagaaaatagactgggtctcagaggctgtaaatatcagaccagcctgactcaatttaggacaaggggaatcattgaagggtttagtaaagcctagccataatcagaagcatgctttttgatcagtttgaaaaaaaaatatgcaatgaaatgaaaggaattgactagacgagagagtaccacataggaggccatgctgtatctataatgtctccaasaaggcagagatttgtgtctgttttattcagagacgtattccaaagtgcctggaagaaagcctaatacataatagctgtttgataaatattagctgagtgaaaaaattcatgaatgaatgacccaggcaaagtcaaaggcctgacctggagtgaaggcaaaagaaatgaaagggaaggaaaagatattgtgaacttagtgttgakcatcaaatggacacagaaatcaacggaaagaggggagcaaaatcattttgaaatctttagcctcaccggctgagagatcaagaagtcattaacaaaagagaagccagaagaggaaactggtttgagagtgaaagtgctaattttggtctaggtatgttgaacttggggcaccagaggatgatatacccayataaggaaatgtagggaatatgacaaagaaatgacaaagtagggtgggaatttgagagagaggctggagcgatggttattgacttgggcaaactctccattaaaacagtaaaagccaaagatagccaatggaaagggcatagagataaaaagaaaaaggttgaggcaaaaatgtgttttcaaatgtctcttttttgcattcctattctttccattccatggtcacaaacctaattaaatctcttagcacatcatgttgcctgtctcctggatacctgggtcatccctttctctccagactattcacatctaatacattytgtggacctcaccttatgaccagccttaccataaggcttctatagaaaattcagctctttattaaatttccatgttttatcttccctgtaccactgatgtcacatttttgttaattaatcatttcttgtgttcatacttgacatttcaaatatattctaaattcttagcttgcaaagaattacaaaatctatcttacacttcctttttcatcttccataataaagtaggtgttcaatgaatttttgttaataatatttgagggggaaagaagacaatcctatcatcactatgactactaaggcaagcagtttactagagattagaattcatgtttattcattcaatcagtaaatatttattgagcagttacttagtgcttgaaactctttgatttatctagagataaaacagtgaacaagactgacaagattattactttcctgaagcttacattttactagcaagtcagaggaagacacagacaataaataagaaaacaaaataaatgggataattttatattggaaaatttgccttaaagaaaatataactgggacagagaataaaggtagatcagcatgggggtgggacacagaagactatccaaaggagggaacattttattacaacctcaaatggaaattttggaggaagaatatccaatgcataagaagcaacagatataaaagccctgcattgggaaccagctgggagtgtttaaggaatgactaggaggccaatgttgactcaaagagagggaacmaacaaggcagtcatataaaaggagattaaagagttagttgggcccagatatacaatagaaccttgaaaaacatagtaaagacttaagagttttttctaatggcaaagacaagccattggaaatttttaaagaagcattttttacctctggctcttaaagtagagaaagatatatggtgagaaggagagagtgcagcagaggcagtgagcaagagtgaatgtagtaagagaagttaggaagccagtgcagtaatccaggagagagagggtgatgactcagtctagggtggtgtaattgagatgtgaaagtggcagctacaggtctctcatagctgtgaaactgataggactggaaactgtttggatgttatwtgatgggtgaggtaaagagagaaatcaggataagcttattttctgaacaaataaatggatgatggtatcattaactgaactggtcaagcatgaacccaaagtaggttaacaaacaagggaaattaatacctcggctttgggtttagtaagcttgagatttttattagacagattaatctaagttataayagatgtataaatgtgaaattcaggagaaaacaaaataaataaaaattacaatttgaaaggtagaaggtacttatgaaagatttctgtgttagatgaaggactttgagcttgatgatgttagagattagtagttattaagggatgcttaaatgatctgagagatacactgaagtgggtgggaagagaatcgaagcagaaaaagataggcacctttttataaagttcctaaattctaggaatgagaatggcaaatgacttcattatacgcttttgactgtaagaaaggaaatctgaaatcaaatgttcctaagaaatttatctcacatagcgacatatttaatgatagaatgggctccatgattgctcaattcagaggttcaacaggacaatgttctcaagaaccgaagttcttttcacctctatactcatccatccatggtgagtgagacaaaactgtcctcaggcagacctgccttgtgacagaagtgtcctgtccacagggacagaggtaatatagttccttgttctcattcaggagaaatctcccctctcaaccagaaacagattaatataactctgtctcttcagctttattagttcatcttaggtcatatgtttacccaaatcagttcatcttcttaggtcacaggtttaccacggactgagcagatccacacaagaatatatactgatggcttagactgtgtacctaatgggatggaagaaatgttggaaggtatactatactataccatacctatactataacattccctacaactaatttaaagaattgacagataatagagaatataaggaacaaatgaaaaagaattaacacccacaataaaatagctatcatttattgcacatttattaagtgccagctacttttctaaagtttttacatgtactaactcctttagtccttataacaccccagaagagctgctattatcgtttcattttatagtcaaggacactgacacatagagtagctactcaagttatagttaataaatggctgagctaggatttgaatccagacaaatctgacttcagctgtcatgcccttaaccagtttgctctagttaaatgaaaatagaaagagggacgataccataaactcaactggaaaattataaacaggaacatgagaagggggattgtatgggaaggaagagtatgatattggtttagctatgttgaatttgtaatgacatcaagaagtctgaaaactgtggaacgtatgagacagaaggttgggtaagatggaggaaagaaatatggatttaggatttatcaataaaaagtaacatggggaaaaatyaagagaaactatgtgcagagaaaaaggaacaaagcccctaaggactgatattaaaggaaaaagaggaagaggctttagtaaagaaatgactagaaacatgccttataagtaatgacagcaaactatgaaatctgtacatcctcaagaccttgagcaatttctgtacaaagccattgttgaagggctatttcttaaatgagagaataaacagctgctatagaccgcttcggctcatcctgtgtttcctcactctaacacaatggttctccatttttagccaagcatcaggatcacctgaacggtctgttaaaacacatttctgggctccagccccagaggttctggtttcgcaggcatgtataatttttatttctaacaagttccaggtgatgctgtgctgctgatctagatctagtccacattttgagaaccactcttgtaatacatggtctttgacttctttgctcttattctctcccttgtatctttttcttgcttctttattctcttttttttaccatgttttttggatttcatatgcaaacacatacagttgctactactctacattattttatttaattcttgcaaaacatcactgagagaatgattattgtgcctgtcttatagattataaagcaaagcttagcacaaaggatagatactttagtactgaatcaataaacctaaattatacaacagactaacattctaatttctttttgaactaatattccccaattccacttatttcctttcttctacttgatcaaccatgatatcatcttcaacaaccaaaatcattttttaacggctattttgaccatatcacataatttttaaaatcgttctgtgcctgttgttccttttgcctgtatagaatccttcttattgatcaactcatttctctaacttggcctaatrtctcaaacagtgctttgcctataggaaatcaacaacatgatgttaactaatgcattgggtagcagtctttcagactttcacctaagccaatatcctacttggccactctccttatcccagtaaagtttcatttatttttttcttttattaacataataattatttgacaataaaaactttgccttttatagtcattaaagcttgtttggttttcatggagggtgaagaagaacttactaagaaaagtttttttcacttaaagaaggaaaacaagtctactatattcccaagtctatactccgagtattttctccctgcatcacaccrtaaagtctataggtctcttgataacttaaaatcacagaaccataaactcaaaactaagagtgatattttatcatctgtttcaaagccatctttatccaggtcactgtgaggaaatgaagtctccaagaggagagatgaatgggccagagtcattcaggtacagcctgacagagttagagttacagaaaatcccagatttccctattatcagtcttgtgtaattctttctgtcgcataactttataactccaaaatcctagtccatctccaaaacattatgatgttcagaatgtgactagctacataggttttgaatcaggcactatgaagataaaaaaaagaaaaacagaataaataaaaagaatcctacaagtttcctcccccagctcaccttgtatatgcctttccccaccaccacctccctgacccagccccccatctgcattccaaggcactagggtactcttggtgcctgcttctgtgagggccttgattcctaggctcacacttcctctggttaactcctgctcaatttcctatctcactttaaatagcctgtccctaaggtgaaatccagccacctttattgccaacttccaatgcctttccatagacagaaagcagccctaaggatatgttccaaaattcactggaaagtggggaaaaaaaataaggacaaaatcatcagatgttaactcaattacctcaattaaaagaactgtctttttttctgagattatatcctttttatatttggggaattatatgttattttatttatgaaaaagcatagatttttttttaaaatacctcaatgaaataaaagttgagcaacctctgtcaatccctccaactttttttcctgaaatttgaaagtcttggaatgcatatyccttactcaaaattactgtgcaaagattcagtctagaaaaaggggcacaaaaataagaaatgtgcaaccaacttgctgtacaagaccctctgttttaattcctttttaaagcaacccagtgcttgtatagtggtgtgtgaaacataggagtttctaagcaaatgctttttagattccttacacttaaaaaaagtcctttgggatgttttatgcagaatgctacgtcctagtttaaatctaagaactcttttgaccttcagtscatgtagaaaaatgtaaaaaataaatgagaaaattaacctgttcaaagaaaagctttaaaaaaattcttcaagcagagcttctccctgttatcattgattaaaataagaaggggaacaaactgaaaggtttaaaaggagttgtcccttaaaatattttatatacatactgcaaaaaaaaattcattctgaaaacaaaggcttctagactcagtttactgaatgcgaaatgatcagactcgtcttattcagatgtgaaggtgaccatttgaggtctcaaatagccattgtaaccaccctgcacaaaatcatttctctgaaaactggctacctctaggacacagattctgcatcacctcacaaaagatggtagtgaaatccctttaggaaatatttaaataatgagccaattcatattcccttcagagtttctcatatcttttgycaacattgaaaatccatcttatccctcacagcaaacaaccacttcatgtgtttcctaggggttagactgttccatttcctttccaccaaagatgaccttgtgtacaggaccagttttgsaggcagcacaagagagttattctttygataacataggatttaaaattcaggacagctaaatttcataggaagagctccaaaaggatgtggtcacttggtggagcatatactgtacacagctgataggcttcacaatgaaacacctggtaaagcgtatctttgaatccttaagcttccctttcttctgcatctttacactttggaaatccatgaagctgctgttaggcagagcatttaatggggatcttgcatcacctcaatattcccacttgtatgcctattttgatgcagtcacactackagtctaatatgaaaaataacttttaaaaggcaatgaaaatgtaagtcaacctaaaaggaacatatatactgagactggtagattcagccatgcattatgcttaatatgtttcaagttaacgtgaacttgtttgaaaagagatagaaaaatatatatacaaactagcagtgtttcatcccatttaacaagtatttgttaaccacctactaaatgccagacactatggtaggctgtggagctatagctttgaactatacacaaccccagcctccaaacctcttgctctctagaaggaaaggtgaacaagtgaatgagctattttctgtttggtgtgataggtgttttgggaccacagggaagcagtgtagacctcaggtgaaaattatcaggaaagcttcctagtggaattgatactggaaagattatttaaagaacaattgatgttggttaatgttatgggctaaaktttgaagtcctaacctccagtacctcagaatgttactatatttgaatacagggtcttaaaatgtaattaaggtttaaaaaagtcactggggcatgccctatctaatatgacttgtgtctttataagaagaggttagaatacagacatgcacagagggaagaccacgtgaagacacaaggagaagacagccatctataaagtaagcaagatatctcgtaagaaatcaaccctgccagcaccttgatctcagacttcagcctccagaactgtgagaaaattaatacagtcatgtaccacataatgacgttttggtcgatgacagactgcataaaaaacaatggttccataagattataatactgcatttttctygtaacttttctatgtttagacacacaaatacctatcattgtgttacaattgcccacagtattctgtatagtaacatgcagtacaggtttgaacccaggagcaataggctatatcatatagcctaggtgtgtagtaggctatacggtctaggtttgtgtaactacactccataatgttcataccatgacaaaaatcacctaaagatacatttttcagaacacatccttgtcgttaagcagcacatgactatgtctcttgttcaagccarccagtccatggtacttggttatggcagccctggcaaattaatacagtcgatgaatgacagtaaatgcagtaaatgctaaaaaaaaaaaaaaaaaaaaaaaaaaaatgaactggaacaaaagagwcaccacttcgaatggagtattaatcaggaatattaatcaggaagtggcagcaaatgagcctgggaagatacacaaaggacatggggacttcttagcttcattgagaagggcctgagatgcctggccagagttcagactcaatcctgagcatgaagggatgccaccagaggtttttaagtgagattgaacataaaaagcttacattttataaaagtcactctggctgcagtgttgattattagttgtctgagagcaagactctttgaagctgggagaccagtcagaaatttaatctagatgagagatgataccaacctaaaatacagtgaaaatggggggaaaaagtttggaaacgtaaatttgagttataataaaggaacaatgtgagaacaaagttgttagaacaatctctgagtctcctccacgctgtcacatttccaccccagtgcttagtcttctcataatagccatatttgtaagagaaggcaaattccgtttttattagttaatatatttggcaacttctcctaaggcacctgccaactccagtgtatctcaggcttttactcttgaactctgaaacccgagaatgctaaattaattcacacttctaagaagaacatggattgaggcacattctataatacctatatttaaacacttcccagaagtgtgctattttgtatgtgtgaaaattgccaacacaacattcacaaaccctcttaacttgcatctccagccttgacgtccctgaagaagaataaactgccttctaaatgtagttagctaagagaaaagattaggaaaggaggagtagaggaaggagtggaaatggggggaaagaaaagagatttttaccacccactagtttgactgtttagtcaatctctttgtctcaacaacctacttttagtgcatgaaagatgtggttactctctgagaygagagtataatctctgctggaaagtatacatagtcagcgtgtctgattttcttaggagctctayctttggacaagcaggagttagcaagaagtatataaagtcagtgagtctcacacatgggaaaactttatttgccatctatgaaatgttcaaatattagaaggatttatttttattatccttttcttcaaagcactccattttaaatgtcagtaagcttttcaacaataaagatagatttcagcaaattgccagtcaaggtttttcttttatttcctgggtgtttcttaataagtggacttattgtagcccagatgtctgtctgtctagtggccagccttttcatatccacgatcattttctctctctcatcatatttcccaactacgctttactgcatttatcttcttaaaccatgtgtgactttctataccaggaaattttcaagggaacatcacttcattttgcttccaatagaagcccaggcacaaagagaaatgataaaactctggcccctgctttattcataaaacactttgcagagtgcatttagtaatttgccattgtaaccactggcactaagagctttcagggccgagttctgatgctgtatttagttcatactttgactgctcagctaaaacttccatttgtatgcatttattctgcttcacacattatgttgtcagtcacttgcaatatttcaaagtcacagcaggctttttctgacacatatttgtcagaatgaactgccttgattgctattattacagactatagtgcctgagtaaggggaaaaaaaacttatgtagtaccagaatattgaaactgcctaataaaacaatagatacaagagaataaaaatagaataaatgcatataaatggatgctttaaaaggccaacaaaatgyaggattacaaaatagacatatagaacccaaaaacccattcataaaaaggattggaattttttgaaaatgataaggagccgaatgagaaaattccactgccccagtgtcagtgagtaagtgagtatcacatacttcctttccagtaaccagggatttaagtagactctgctaatggatgctgtcattgagagaaattttagcatgaaatctcctactgaacaacaataaaaacacatgctttgaccaaaaataataaaaactatgaggaactaattagaaatccagatcctttatcattcttgataaactactgagcatgtaatctgaaaagacctgtgccccatttggctgctcttttctctaccttttgatcttacccatacttcagaactgaacaccatataagtaccayagaaatccacttgggaatcagggaatttctctgccgatagggatggcccttccttaggattcctcaaatttcaagacttgcataaagcataagataagaaaattaaataagacataataattagttttcaaacctcttatcaaaagtaaattataaaatacaaaaatctaaaacatttttattaatgccacagatcagtagaacagaaaaatctaagctgtgttgctcttgtctttggggcaattatataactttatgaatttgcttcacttcatatgtttctccacatattttcctaaagtaatattcaagaaattatgctggacatgaaaaatctctaacagatccactgtttggaaaatcatttctttttttaaaaaaagaaagttatgatgaagagtaattatcaaaactggaagaaattataaagtaagaaaattgtaaaagccgaaagataggtcatctacttgcttactctatttctagaaataagatttaattctttctaaagatgttgtgtttaatctgaatgttattaagaccccaaattaaggatgactcttttatttctgtttgaatctttataacaaaatattaaaattacttttggaaagctttaggaagtttaaattgttctaaatccctcattgtctcacctactcattgtcttggaacttcttacaaatattaatggctttttgatgcatattgattctttatgtaccatatgactaatagcataactctagatgtacactcagaaaagtcattacagtgatatatacaccaatgggattcagaaagcatttttttaatttaaaaaataccttcattagcatagttttcaaatttgtaaacaagttttatattaaaagcaataccttgttgaatattaaaatgctgagatacttaaaagaactcaaaagttatgcaatatatatcataaaaacattatatatatataaatgtatcttcagtacatcaaggcaagtttaaaacattaacaattttattaaaatatccattttatttgataataataaaaataattgattctaggagtcaattattttttctgagaaaaaaataattgtttactggagtcagtagtcattctactaaattgtttctatttaatgtattagaacagataaatgtattttgtctaagtgggaactatttaaatattaaataaatattttcaaccttaattrtattccacagtctatgggggcrttgagaataataagtaccataaagtgtaaagaytgggggacaagaaaagctctaaaatatattaggtaatttgtttgtattaattaacctatttgctatttttgaaaaattattgtcagcttagatctactacagatgattatgtctgttactaaataaagtaaatttagcctattcatcaacatgtaaatacctatatcaaataagacaaataggccgagcgcggtggctcacgtctgtaatcccagcactttgggaggctgaggcagacggatcacgaggtcagcagatcgagaccatcctggctaacacggtgaaaccccgtctctactaaaaatacaaaaaattagccaggcatggtggcgggcacctgtagtcccagctactcgggaggctgaggcaggagaatgccgtgaacccgggaggcagagcttgccgtgagccgagattgcgccactgcacttcagcctgggtgacagagcgagactctgcctcaaaaaaaaaaaaaaaaaaaaaaaaaaaccaaataattccagctgtcatttcaattgaattttccataagaggttcaattttttcttgagactttttaacagtatccacaatttcagacaagctcacatgagtttgttttttcaggtagttttaacagtgtgataagatggtttactgccctagagggaaaaggtgtcaatgtgttatcagttggtatgttctgggcctttggtatatatagaaagtctggcattttagtaactctacctaggataatatacattgataacatctatttaagaataagaaattcattagctagccctaccttcagatgatattttattcatatttttatttcttttcacacagtatttctttataaatctctgcttctacttcttaagtatttrtatattggtagaaactcactttatcttaataattataatactttaatgtatttagaatattgtatatcatakgtaatacttaggatactgtacatattttaacaaataaggagtgaatactgaaattaaactgtagattgactaaatgaaccactgttatagagcttcggagatacagaggagctcccaccaaatcctaaaatttttctctactttaaatactctatcatggaactattcgatttgatgggacataaatctttttatcgtaatgtcatcctggataaaaacatgcacacatgcacacacataaaaacaagcaaacaaaaaaccaagtaatactacactctttgattcatacctgtgcaccaaaggctcaagcgtagatgtaggaggaaaaaaaaaacaaaaaactgatccctctacttccagtcacttctgccccaacttcaaagaactcaaactcaaaccactagttctatttgttcgtttgttttctgtggctgagttcttactcaaaatgttctacttaagcctctccttgggggactgtctccaagctacattgaggacagagtctatagctagattgcctaaggtacaaatttcttgtagaacccaatacagctgccaatttgcttttgagggcaatcaagatgttcattagtaattgagttgaaacagagaggaacttcatttgtactgagtcagtgacctggatcgttttcagaatgagtgttgagctgaaatggaccattcatttctacttccattgggatcctgttcaaaaaggttattgctcttaccttcttccaacaacagtgataggaattttcagaagcaaaaaacaaggttttatgtttgccacttgtatcttagggcaacatttataataatgggatttttaatcaatcttagagcataaaataaaccctatcattttagactgacctgttggaytaatttcaatgactttagctggtaggtaattgaaataggatgacagtacactggggtgaataagaggtttcaaaaatagacaaagataacaattagacatatttggagcatcaacagaagttagtataaaattacaggaattttagaaattaataaaraggtcttatttatttaatattgaaataataccatttaaataattttaayagcaaaggtcaatataaggcatgctatcaccargcactattctaagagctttatatacctcttgttacttgcaactaccrtgttttacaaataaaaaaaactggagattacagaggttaagtgacttaagtagcttacccaagatcacaagagcagtatataatggagttggtattcaaacccttatagtctggctccagagtccatgctctcatcccctctactattaccagtctcaatgactggcaaaataagccatcagcattatattgccttcagattctgagtagttctctagagaatgaatgagtcataagggatgaggatgcttggctgaatagttttgcccccattattagagggtaagagcaattttagaatttcatagtgttcaatctccagcgaatagtttttatatagggaaactgaacgaagcaactgaaaaaactatttttactcaaaatttgtgcaagaacttgagagcacatgttaacaaacctttgtaatcagttagcagagcatggctcagaggataagtttttctccacacttctggggagactccagggccctggagcaagcatttgaacggaggccttaatggacttaagggcagagccagcccagtagcagcagcagccctgtcaccaggaagacagtctagcgtagcaatttagcagcagtggcagcaacagctaagttaaggaggcatgtttaccaggcttccaagttttgaaaggtcttagaatcaggcaaaaaaaaaaagtgccaaaaactggaagtaaaagggccatatgacatcccaaagtccagaagtgcatgtaaaatgtgcacaggtgattcccagaattaattgaaaggaaatttacagaggctggaggtctcacacttatgggtgcatatggaccagatgaatactgcttgtttataaagttgtcgtcacacctggctccattgtgggtataggctgagagacacagattatatattcaccaacgaattactagtattctttcccatacatcttttggttatgttcatcatattatatttaacttaaaaaaatgtgttaaaattcaatttgacaaataaaaagttctgaaattaaaagagaaaattttaatttgatagatgtcaggtcttaagaagggatgatgaatggaagattatattcccttttttagattttttagattttgcattctgccataaatttccctgcagtgaatgattggcagactagaataagacatcaggaagaagagatataatgaaagtttaataggcagattgcagacccaaacatagctgagtcatcagtgggaatttccattggtttctcagtctcttttaaatattaaattaagcttcactgttaagaggactcagtactgaagatgggagacctagttcttaaagcgaaaatctcatcaagatataagatctgacccttttgtattatatcattttcaattaaggttttaatgccctcttttcataatggaatctctaatttactttaaaaaattgctttcacatgactcattattttacatgaataccagcattggtatgataatagtgtcaaaaataaagcactattcgtgattttttttttctgatgcagggttggaggcttttctaaaaaaaaaatttttatagaagaagacttaaataattacagttgaatttaagaacattatccatatgaattatttctaacaaagaatatccgcatgtgaaaagtggcgggtatcctgtatttctagctacatttactcagtgttttaatgtcagttaaaatgctatcccagtcaaaacagctcctatacatgtaaaattatggttatttctcaaattataccattttaaagtgaaaccacattgaaatgatattattttgatatgccagcagatacatgtagtcacccaaagaagttttatattacaggtgcttgaagtcagaaaaaggagccttttttataatttcataatgagaaaaaaaggaagtcagagaggtacgatttaattcaaatatacatttgtgtattagaaatgattatggagtaaatgccttatcttattattttgattgaatcttctgtaaagaaatatgagaaatactctctatcaaatggagcagtagtcgcgtatctgcctccctcccccacaacatgtgagtaaaaagtttaaaaatatattttaagaatcaaagtttaaaattataaatatgtcaaaaattgtgacagtctgagatcttatatgacttgcaatctaccaagttagcctgccacagtttcayagatgctaacagaagactcaagactcctgggtcagaaacaagagtttattatgcatagcacaggcagcatgagccttatgttttcaccagttccccttgtctccagagcccatgcagataatacaaagacaggcccagatggatcctgctcacagagggcatttagaaagcccccaatcttacactgagactgttagaaaacctgcccaaacactgccccagagggagatattatctctcttatccacagggggaaaaaaaaagcaaaaaactgacctcgcacctgaagaaaggtactactatctcccaagtgtgttggctwtacaaacatccttgaaaagagtccaggatgaaagttgtccccagatatgcagaaatgaaatggagaattgcatcccaacaaaatgtagtagtcaatcctcattattcacgattctgcatctgagaattggcttactcactgaaagtaatttgtaacctccaaatcagttcttgcattgttttcatggtcatttgcagaaatgcacagagtggtgaaaatttgagtttgctcgatgcttaagtttccagctgaggtcaaacaaggtgatattctatcatcttgttttagctctcatgcagtaaacaagtatccttttttcagtgtcatgttttttgcattttcgtgctttctttagttggtgactttgctttttaaaatgacactgaacggtgctgaagtgctgtctgatactcctaagtgcaagaaggctgtggtgtgtcttatggagaamatatgtgtgttcaataagctcattcrcacttgaattatagtgctgttgccatgagcttaatgtttgtgcatccacaatatatattaaataagccttctataaacagaaacatgcataaaacaagtttacgggttaatctgttgatgaaaatgtagtgaccgaagcctcacagaaacctaaccctgaatttcttgtaggaacaatgattgaatatcagtgaattcagtgtttgcagtgattttatggactatcactaccatgaataatgataatcagctgtgtagtcrgcacaaatggcagcacccttgcttccactctggctctcttacagtgtcatcaacaaaacaacaagagtggttcttattatataaaccgtaagtgagatcatggctcggttctcctcagagctcttctgtgactttccctctaactcagaatcaaaggcaaagttatcccaatggtcctacagcatgtgggctccccgccttgccagctctttccctgtggctcctgacatcacttcttccattccccccaacccttgctcattctgttccagctacctggcttccctgaggtttatggaacatcccaggcagcttcctgcctcaagaccgccttacttacttctgcctaaaaagctcttggattttttttttccaaatatctaaatggcttactcctgcattgctttcaggtgtttgctaaaatgtcaccgtctcactgcggccgtcactgaccaacctacttaaaggcacacrcccatccctgccaactctggttctcttcatccctctttctgctttgttgttctctatggcaccaccaccacctggcacactataaatattatgtttacctgtgtccttcccataatatgcagaaatattatgcaaatattatgcaaacaatagtctgttttattcaytgtggtwtgcccagtacctaaaacagtgcctaaaagttttkgaaattttcagtgacttttttttgcaatagagtaagctctatcttkatctgcttctaaagacagcaccagagaacatttctctgaaacataaataaacgtagagacacagctcaaaactcttgatcagactcagtaaagctagaaagctaattggaaaaaggtagcagggtgttttcaagctgtcttgaaaagagatgagtggtgaatctcttcatttttaaattgggagcaatgyttgtagtagcatgagagtttatattaggctatcaaaataaaaaaatgacttaaaccctattaactcagaaaaatgttgtctctgtaatttctttgtctaatagtaccagatcaaactaatccctcatgaaggaagaagagtgcttttccttgagaaaacaaaacaattagattctagctaaactgcccacaaaacacgaaatgtttcatttaactaagtgagaagacatagcttgtttaaatcctaaataaagaagcagtctccrttaatggaaggcaagtcccttacaagcatgtttctctctgcacctaaacaggtatcaagcgaactcattgtgcttcctcatattgccacagagagacacagataaatggaacaaatgccaggcaaactttgaaacggtttgatttgatgttaactctaattctgagttttaccatcagtggttctctcatgctatcataacccaaatttctctaggcctygccaattgaggaatgcaaacaaggccatatcatcatcaatgagaacttcaaattcactgcttcatgtcccacagcagaacatagtgcctacagcctcccttcagtgattcatacagttatggaggtattttgagtgctcatgaagagtcctcttaagatttctcatctaataatgtgtcccccaaaaccatttgagagtcacattttggctgcccaggctcaactataacaatgcacagccacaccaacggtgcaaacctttgggagctgaagcagagccagtttccccacagtactcactgtgtgtccaaaatacatatgtatgtattatgtgtgtgtatgtgtgtgtgtctgtgtgtgtttgtgtataaatagaatatgaccccagagtaagagggttactgtaatatgaaggaggtagcggacagtgtaggctctaaggatcaggcagtgcttcatgaaggaaggagcatttacgtaaacctcagtctatgggccagatatacatatcatcagtgttattatggaatttttggctagaaaaacgtttcttccagtttttctgattcctatatttcaagaaggcaatctctaaaactttgagtgtattagtgaattcacatgaaaaacttatcatataaaaagtagttacccagggtatctcagtgagaaaatgtgggagattgctttagtgtatgctatgtgggatcatctttctcatacatcacctggcttaaacattatttttttcaaacgtattcggattttatggaacctggattctagtgctacaaaggacaatataagataagggagaaaatgagtggratgagttgtggatcaggacttaataatgtatatacagtggtcaaggataaactctctaatatgtgagcagaaacctgaacaggtgaaggagcaagccatgcagatgcctgcaaaagagcatttcacacaaagggaacagcagtgcaaaggccctgaggtagaagcacgatttcatactcaaggaacagtaagcaggcagagagcagagagggagggtcacaggagtggaagtcaaagaggtggcccagggccagatcatttacaactttaatagccagtgccagggctttgctttagagtgagtaggaaggcactacaaagttttgagcagagaaatggtgctatctgaatgaaggtttaaaaggatcacagcagatgctctgttatggtaaactgtagtggacaaagtggaagcagrcagtttcatgtgatatatggcaatgacttggaccataagggcagcaatgtgaagtatgtgaagtggtctgattctgaatagctgagacagaatttgctaacatgttggatgtggagtctgaaagagaagagccaagtatgactccaagtttcttggtttgaacaactagaagggtagagctgtcatctaatgagataagaggcctacaggaagaatattttggggtgggtagggacgtgaaaattgggagatcaattctggacgtgggacgtttgaagctgtggagtatacataatttcagctggacctgcctttgctttgcmgtttattagctgtgagatcttgggcattaactcagcacttctgagactcaactttcttatctgtattatgaggatgatagaacctaatgtgtaagttagagttgtgagaattcaacaaaagaagaggtataatgtacctaaaacacagattttaagagaaagtaaaatgaaacaaaatcaagtattaagtaagtgattagtaatttgtgtttatcaaaatcatcatgacagtaggtgtggggtttcttataacagtagaagaattacttttaggaaaatttctatgactgtggtttaatgaaatgaattctaattaaacacttaagaaaggggatccccattgcataccatccagtttcaacttgtcttttatttttaattccttttctgggtttactatggtcagtattctctgctcttccataggtatgtcagttgttttctcatcacttggcaagaaagctaaatcttcagtcagtttggtagagatttctgtacaaagcaataaatgcactcttggctttattcctttgcaatttatatagtccctcagatggtcaagttatcaagatattattctgatgtatttgtctcatgttgttctccaaaattactaattcatactctccttccttaaacctcttgtttactgttaaataaagttttgttttatgtggggtagtgtttttacttcattcatcctgcctacattcagctcattttaagatgtgtcttttatatgcatttgtcttccattttctttacaaagctggttcacacaaaacagtcaaaactgcttcacttccagtgtgctccatcacctcaaaatctgctattttgtttgtacacttcgcacctgagttaggtgctgatgatgtgctttaaaagccaattttgactgytctaaatrstatargttgacattcattaagttgcttggatataccaaattttctgtatcttcttagaagtctctcctcttaaatttccggcttcatttgccatgatggttacatttgttctacctaacaccctttgtttgtgttacattctatgttcctgaacagaaaaaccctgacatgtcactgtgtgttttactatttatacttccttcctgaaatatctctttccctcacccatatgaaaccttactcagttttcaagatttggttctaatattacgtcttcctggaagtcacttcattctgcatttattcatccccacttttcttatcagaatcggttgagtagtagagcacttatatgcatatcttcaactgaccacaagcccctgaagggaaggtacaataactggtttaggttttatttcccaaaatgtcttgaatgtaatagatgatcagtaaatgtctattgaaatagtatgcttcttttaaaagtatgaccttttagtttttatctgctatgtcttcattgtcagcactgttctggcataacaatccatgctagttttattgtgctaaacacaattttattaattcaacaaatttgagcaccttatatattatatataagcaccttttattgaatttggtcctgagaatgcagcatatgcataatcccttccctagaggaactcacaaaatgaaagaaaaaactggcaagtaaataatattctatatgataaatgctacggtagtgatatttttcagagaggtatttaagcatctaaagagtttcagaggaagatggggtttggcatgtcattatgttagatttgggcgatttgaagagtgcaataattattataagcacctggaacagtgccttcctgtggaagccattctataaacactgttgaattaattacatggtggcacttagaatgtaggttcagaggacagtaagaggatatagctaaaggtaaggcactttaagtggatcatggtgttgatatggtttttctgctttattgttgacctaagctttcagtcacttatatcctcatttgagaagtctctggatcttacatgaatatgaaaatgaaaaaataagactaagtagcttctcagataattaggatgaattcataacaacagttcccagaatcttccttaagaaagacacaactactttagaaaatgaacctacaacattaatgtaagaaagaaggaaaaaacaaaatctttataaaattctttttaaatattacaacactccttcaaatgattgtcaaatttcaggttggtatcgggtgctctaattttatttgtaatgaaatagaacctttttatttatcagtcagtaattattaattgtacaaacatctattgaaaacatactatgtgatgacttctttactaggatctagagataaaaagacaaataaattggcttttgccttcacttagcatattccaactgattgaaaagagaaataaataagacaattcagtatatcacagttagagttaagtcagaggtgtgcatggatttttgagaacagaaaagaggatctaaactagactgggaaacaaaagggaaggctttttgaaagaaatggtgtgcttaaatkgggtgattttaaaggacaaagacagactagcatggcataattactaggtagaagaatcctctaaccaagtacatccaggtatccaatatatctgttagattctctctctctcttttttttttttccaaaaatctgtgctcttcatggccttagtgataaccaggaggtaccacctatggagaagacttatctttactgcctttgaaaaagcataattctaccatgaagtgtcattgatgggcttaaattatcaaaagagaggtctgcagatgggtttcatggagagcagtggcttcagttgtcaagagtcccaggatataccatcctgtctgtcaccaagatgctgaaaatatatcactgttacttccatttgctgaaaatgaaagtagcactctttaccaaagtttaggtgaacatactgattaatattttagccataagatttataaagtaacatccccatataaatattataggagtgtttatcctgtgaaaaagatgagatcaaggaactggatttattaagccacatarcgattttttcttttgttcaaattcgccatgtgaaacaagatttaacgtaatgcagtgtaggatcagcatagtgccttgagatggactccaaatatttctaataagaaatttaaaagaagtggcatattatggaactagtatttcttttcaagattatcaaatgtaatgatgtttttcacctttactatatttaagatgtttctgtaaactttgagtgattaaaagactagcatttttctccttatcttcatacaaacctgagacacaatgacttgttatgcattagctatggccaacaatagcttagtaatattttagttttctgttactgtcagataatttttataattttttatatacctaaagcttttcactcaagcattacacatttctctgtctttataaacagagtattttaatcccaaataatcactatgaaaaagcattattttaatgtgctttaagactatgataccatgagagattactgaaatgtatataaccgttttctcctacactcaatgaactttgagttctgttatctgattttcatagttgttctctttttttttgcattcagactgtttgcccttactttttataattcctattgctacctcccctttcaacatttccatctgtaatatgctatttcaaatgcaatttatttcagcaaatatgcattgaggttatacaatgtgttagtcacattgtatatgtgtatatgctagggattcagagataaatgaaacatggtcttagccttcaaagagttgtcaggtgagaaagaagtagagatataaacaagtaattacaatttgtgtgtgctaattgcaattattaggattttattctccggaaaatgtggcttgtgttcctggattttggcaaggtaggatgggccaggacaggacttaaaagggctcagcatcaatggataatggaagaatttaaagcagagagttttgaagtaaatcttaaaggtgcatgggagtgaatttcctgtggagaaagatatgtgctataaaatttaacaaatattttgtaaaaaatgtgtctaaaataagaacaaattactcacagttagactgaagatactatcccagttatgagctttggatagttacttcgtggcatcagttttgaccatttggggttttattttgctaacattatgttttatagtaggtacaaaatagtttggcatgcttastaagtgatatctcatgagtgaaatgttgatgcatttactatgagaatttgtaataagagactgcattttattatagtacatcaggttttattgacactacctttccactatcagtattttctaatgagaaaataattcaaaaatagtattagacatacaggaagcctctgagttaatgtggggtcatgtttctaaatatactttctatatgagacaatttgtgtttatgatggaattgcatgtctgtaccttataatcatgcatagaaaatatgtccttaggcattaaataatcaacctacaagaaatttctggtggcaaacatatgtgttaccttttcatatttaaaataccattcttagcataatgcacagtacaaaaatatatattggccattttattattattatcatttaaaatgatatgctaccagacttattttggaaccctgctgaaattcctacatgtacagaaaaaaaatttagtgatatactgaagttaactaatgtcagtaaagcgaaaaactaatgaaactcactgtaatatattcagtctttgaactatctgaatttcaatttaacctcaagattagactttgtatgtgtctccccattcccttgcataatattcacgcaacacactccaaacacatatcttttatttcatgtagcaattttcaaagagatggatgggggaactgcacatcagtttctccagacagtatataggtacagtttgaaaaagtcagtcctcaaaatttttctttctactctacattcctctcactgggctccaacccaccctgcaccttctctctcacacatgaatacaagaaaaatcattactacaaaatttgaagatgatctggacctggacgtttttcagagcaccacttgctaatcagcttttgtggctgttttaaaattccaatgctatacccttgaaatacctaacttctaacagtataacttcttgatgaacttcccaggataaattagtggcaaaatgtgaccctagggattatgtatgtgtaggagcatataaagtctacacatagatactagtaaagtatggcaaaaagcataatttttcacttttacagcagttatatcttaaaggattctttctttgcactaggtacagtttagarcaattgtttattggaacgaatgataatatggttttttacatcttttcattcatatctgttcatgtcaaagatcatttctatgcaccctgaaactcaaggtgcagtaagctaaacttaagaaaactgaaatcctgtaataaatttatatctcttgggatataattgcttcctatccaataacaaagacccaagagaaagaagcaaaagtyatatttttttctratatactgataaagagaatagcaaccatgaccaaatagaaatcatcaccaaagcctattcacatctcatacaagatcttgacattttaacttggatttataagcctagatttagatatacctacatcaatgatttatcaaaacaaaactttgaatgtctcgaagctgaattacttgcctatggaataaatgggctacactgatactttcacacagtgtttagaggggtcctacggtgcatcagtgtctgcccctagaggtaaggggaaggctgactactttgagttctaggcaagtagcctaggcatttcatccccttgtttcttccaaaacaaatctagttgtctttgttagtgacatggttgttttccacatagatttattttaaaaaagaacccactactaatctcatttgaaaatcactgagtccatccagtgggaccatgccacaagagcaaacactgtaaacaaattagcaagaatctgattctttcgggaagaccagactttgatgaaggcagcccagtgtgcgtttgctttatgatcaaacattctatatgtgtacataggactatatcagtatcaggttctgagatgggtcaataagacaggaatagttagtttgggtttgtttctacttttgccatagaaacgtggggagggggaatcaaagtagctaagcaatacaccccaaatttgaaactgtcctattttaatagagaagatcctaagactgctggaaaagggtctgacagaaccagtttcagagtgcctcgtcatgtttcgctgtggcagaaagcactctgagcagagtgacgttctaaaatactatgcactaaagagaagggtttgatgcaaacttttgacctaggcccttggtgtaaatggagggatttcccttaatcatttcagcctgagaaagttaagtaagtgttacccaaaagggttttttccccattttgagcattcaaaagtcttgggacatgagcactgcattgactgtctggtatagaagcckgttgcaaacttgatcagcccctgcccaggtacaatggaagggatcccacactgggagtacctgggtgtgagctctgccactgctttatactaattgtgaggccttagtacatcatttagcccctctacaactcagtttccccgtctatgaaaytatggtgataatttctatctacctcacagggatgtttgtcaaaagtcaatgagattagaaacatgaaagttaaatgtaagtagaacaacactatatatattatcacttattaaaatgaaccaggttgggcgcagtggctcacacatgtaatcccaaaactttgggagactgaggtgggtggatcatttgaggtcaggagttcaagactggcctgaccaacatgctgaaaccctgtctctaccaaaaatacaaaaaaaaaaattttgccaggcatggtggcatatgactgtagtcccagatacttggaggctgaggcaggagaattgcctgaacccaggaggcagaggttgcagtgagccaacatcccgccactgcactccagcctgggtgacagagcaagactctgtctcaaaaaataataatgataaaataaaaaaatataataaaccagagcattcttaaacacaagcaatgaaggtatctgttctacatcctgctatttcaagtcccctttctgaccttctttttgctgctcccctcactaccagttgaggagtttatagagtcaaggggatagatccagcaggagcctgtgcccctcttctagatcattccccaggtgtccagaccccataattccctgctcaaactcccctgaccccattttctgggccaatggatcacttgtccccattacattctccaagggggaacccccccaccacagatgtaactccatacatccaagggtggccaagggaatagctgtttgtgggggtgtcgatggagtgtggacatgtacagcatgtcacgtgcatgtgggcaagaacccccatgggcagaaaagagctaaaagtggaaagaaaaggatakcatgcagctacaattcaaaaatgtattttactttaaaatttgatagtttgacttaaatatttagaaacgtggcatgccagcttccatttgtactttcaccctgtgctacacaaatattaactgtttcacatttgccatcattgatcattctgtgcaattataatttattcccacaatttttttctaattttaggactaattgttgttgaatattttaccctagagaggaaaataaacttttgtctgagcaaaatcccaaccatttcttcatgattatgccacctgctttgtttttgcttataccacagccatctaaccaatttgtagatatcctatcttttataccaggacagtgttgcctgatgggcacaatcctcttctcacatcagtttggaaaataaaaacattataatctctttttttcctttggtatccaaagataagccctttaaaaaagttgaatgtaaaaggatgataaggagattacatagtttaagctttatactcaaaatcattttatattgaatctctgtaatgattttgtgtaatatctttaaatagcatagaatactatttatcagcggtagaaccaatttaaattactttcagcyctgatgagaaatgggaagagactgaagtacactacacattggcatttgtacagttggcagctgggcaaatagcagcaacatccacctacttatattaattatctaggttattacagtagagattaaacagagcaggtaagtcaggtaattagcttctttataaaaattgagactacccyttttattcttcactgcttcsctaaatcaggaagcactttatgtattacaagcatctaaagaaagtggaaaaatctactgtaaacattttatgttttaaaaaaattattttaatttttcatctttgatttaaaagattgtatcaaaactttaaatatcttcccatctcagtgcaaaataatgcaaaaaagacaattattgccatggcctacatttgtacagggcctttttcttccagtattttccttttatatctattttctcatgtttgcatcatgacaatcttacatgttaaaaaatgtaacacaaacatcttacaatcactttttttcacaagacattatttttcttttattcatcatttattgacaattgaaacattccaaatgattctaatgaatgtagacagatctttccttgtcctaatccctaagctgtcctttaaacaagagccagacatacatgaaayaagccattgactttcgattgaaaataaccttagacattctaatcttttattaagcactgtccccaggggttgyaaactcaaatgccttcaaggagtgacagttaacaaaacttatgatgcgcaccataaatcaaacttgatgtgtgatcatacttcacatttgcttggttagttacattgattttcaaactctctgggtagtatgttcctctcagagcaccaactagtgaccccgccctctctagttccctcttttcttcttcacctccttcttcaaccctgctttttttttcagactcatgacttttggctttatcttcttttcttgacccccacattgctcctttgactcatggcatatatggcgtcttctgttttgaagctttggctctatctttcagacagtttgcaagtgccctctggctacatcctgtcaytgctgctaggtgttatactctraagtataaagtcaaaacaaattatatctaccttaactctgggcacttctggtgggtctgccctgtgcctcaggttcctgtccactaatactcgtgagcgtgagataagatcatcattctagttaaaaatccatcactactataagtattcaagttcatttttggttaattatattgaagtgccagtccatgtttgagtgctgtatttttatgtatagctgtcaggtacaatgctgtgcagtctctrgaattaatctattattttctttaaaataaataaaaataatgggcactaaatttgtgtttcagacttcaaaccctccttctgtaatcaatgattagtgtgaatgtataagcactcattaacatttcattccctgttttgatttaaattttaactctcccattatgaataataaacagagtgtctgatcacatttgaccttttgaggcataacrgtgctttttttttttatttctttaaatatcataaggcccaataggtcacttccctgttaacttttcttacataagaaatttaattattttaagagaaaaatccaaataayatctcagtaatcttttaagaaataaatatattttctttattgccaacagaacatctaaaaagtggacattaaaaaaatgagtttgaaatttgtttgatttttcaactgtacattaagtatatctgctatataatgaaagcttttttcctccccaaagattctcaaaaaatgtgttccagaaatacagataaataagtaaatggatggaagaggggggtatatttctatcaatttatcattatgtttattatttcacataagacttatcaaagatattctttggttatctttgataagtcttgattataagccaattatgaccaaccaaaaatggtcctatatatgtaaagtataactaacaaagtcaaataaatttataattaattcatcagctccttaaaacatctcacaaataacgtgaacctgtcatatattgcgtgtgtgtgtctgtgtgtgcatttctcccttacatctcaaaggtaataaattggttacaaaaagaaatgaagagaaatgaagtctggagtaacttgccaaagaccttgacttaaataactaaaattatatccacattatctaacagttttttttaatagatagactatcacataaaatcatttataacataatagtaacttgtgagtagtagttaaaagtacatgatactttgatagtgcattttctataagtgtttaataagaaaaggtatctggttcttgtaattatattgatagctaagatttattaaacacctactgcatattaaacactcttctaagtgcttatcatgtaggattttgtataattttcacagccatagtctgaaataagtactattgtggaaaggaaactaagagaagttgagtaacttacctgaggtcacacaccaaatgagtcaaggtactgcaggcaagattggcagtggatcccgagctcacacatctaaccactttgctctactatctcttaagagcagtgaaagatttaggagagaaaggggaaaatggcctgtttctctaactttatattatgcattatttacttactaagcttctgttttatttttgatcatagaatatatatgttattttttcaaggttaaattgcaaagtaaaagcattatagtgtaaggaataataatggcttatactttccactccaaagaatttcctaagcagaggttggaaacaattttcacgcgtcactgaaagatagcttccttcaactgrataatgttaatgtttattggcacttaatagccttagacaggacagtattttgaaattcaagagtaatttgaggtaaccagaatatgaatacacccgggaagagttgtcatatttcaaaataaagcattcagtatgttgcacaaaacagttcatctgtattgattgccactaatgctagaacagttagatagaccaatggaactttcacacttgtggcatgaaaatagttcttgaagacctgtaactttgaacaaactaatcctctatgttcattatccatttaatgtggagaaatgttttgggtaaattattgttgaaagatttaaaattcttaaatgtatgctaaatggaaatgtgaaaaaatttattagcttcaagaaccaaattaggcctcaaagcaatgatctttctaaaaattctagatcatcctgcataagaagaagatagagtagcatagcttagataatttaatgtgcataaagaagaaagtcctgtgtctttattgatgacactgaaatttgaatgacaaagacatggcaatctggctttacccattttccgtggcttctgctcacacataaatggctgtaacctccacccccttgttatggttacaaattatgggattgtgtaacataatacaatgataacttaagtttagctttttactttgaaaataaaaacaccttcctgtgtccatgtgttctcattgttcaattcccacctatgaatgagaacattgtgcacatataccctaaaacttaaaatataataataatgaaattaaaaaaaaaagatattacaaaaaaaaaaaaaagaaagaaaataaaaacacctgagagtttccgcaagatggctgaataggaacagccccggtctacagctcctagtgtgagcgatgcagaagacgggtgatttctgcatttccatctgaggtaccgggttcatctcactagggagtgccagacagtgggagcaggacagtgggtgcagcgctccatgcacgagccgaagcaggacgaggcattgcctcactcgggaagcgcaaggggtcagggaattccctttcctggtcaaggaaaggggtgacagatggcagctggaaaatcgggtcactcccacccraatactgcgctttccctacgggcttaggaaatggcccaccaggagattatatcccgcacctggctcggagggtcctatgcccacggaggctcrctgattgctarcacagcagtctgagatcaaactgcaaggtggcagtgaggctgggggaggggcgcccgccattgcccaggctcccttaggtaaacaaagcagctgggaagctcgaactgggtggagcccaccacagctcaaggaggcctgcctgcctctgtaggctccacctctgggggcagggcacacacaaacaaaaagacagcagtaacctctgcagacttaaatgtccctatctgacagctttgaagagagcagtggttctcccagcacgcagctggagatctgagaacgggcagactgcctcctcaagtgggtccctgacccctgacccccgagcagcctaactgggaggcaccccccagtaggggcagactgacacctcgcacggccgggcactcctctgagacaaaacttccagaggaaccatcagacagcagcattcgcagttcatgaaaatccgcggttctgcagacaccgctgctgatacccaggcaaacagggtctggagtggacctctagcaaactccaacagacctgcaacagagggtcctgtctgttagaaggaaaactaacaaacagaaaggacatccacaccaaaaacccatctgtacatcaccagcatcaaagaccaaaagtagataaaaccacaaagatggggaaaaaacaaagcagaaaaactagaaactgtaaaaagcagagcgcctctcctcctccaaaggaatgcagttcctcaccagcaacggaacaaagctggayggagaatgactttgacgagttragagaaggcttcagacgatcaaactactccgagctacaggaggaaattcaaaccaaaggcaaagaagttgaaaacttggaaaaaatttagacgaatggataactagactaaccaatacagagaagtgcttaaaggagctgatggagccgaaagccaaggctcgagaactgcatgaagaatgtagaagcctcaggagccgacgcgatcaactggaagaaagggtatcagtgatggaagatgaaatgaatgaaatgaagcaagaagggaagtttagagaaaaaagaataaaaagaaatgaacaaagcctccaagaaatatgggagtatgtgaaaagaccaaatctgcatctgattggtgtacctgaaagtgactgggagaatggaaccaagttggaaaacactctgcaggatattatccaggacaacttccccaatctagcaaggcaggccaacattcagattcaggaaatacagagaatgccacaaagctactcctcgagaagagcaactccaagacacataattatcagattcaccaaagttgaactgaaggaaaaaatgttaagggcagccagagagaaaggtcsggttacccacaaagggaagcccatcagactaacagcagatctctcagcagaaactctacaagccaaaagagagtgggggccaatattcaacattcttaaagaaaagaattttcaaaccagaatttcatatccagccaaactaagcttcataagtgaaggataaataaaatactttacagacaagcaagtgctgagagattttgtcaccaacaggcctgccctaaaagagctcctgaaggaagcactaaacatggaaaggaacaatcagtaccagccgctgcaaaatcatgccaaaatgtaaagaccatcgagactaggaagaaactgcatcaactaacaagcaaaataaccagctaacatcataatgacaggatcaaattcacacataacaatattaactttaaatgtaaacggactgaatcctccaattaaaagacacagactggcaaattggataaagagtcaagacccatcagtgtgctgtattcaggaaacccatcacacatgcagagacacacataggctcaaaataaaaggatggaggaagatctaccaagcaaatggaaaataaaaaaagtcagggattgcaatcctagtctctgataaaacagactttaaaccaacaaaaatcaaaagagacaaagaaggccattgcataatggtaaagggatcaattcaacaggaagagctaactatcctaaatatataggcacccaatacaggagcacccagattcgtaaagcaagtccttagtgacctacaaagagacttagactcccacccaataataatgggaggctttaacaccccactgtcaacattagacagatcaacgagacagaaagttaacaaggatacccaggaattgaactcagctctgcaccaagcagacctaatagacatctacagaactctccaccccaaatcaacagaatatacatttttttcagcaccacaccacacctattccaaaactgaccacatasttggaagtaaagcactcctcagcaaatgtaaaagaacagaaattataacaaactgtctctcagaccacagtgcaatcaaactagaactcaggattaagaaactcactcaaaaccgctcaactacatggaaactgacagcctgctcctgaatgactactgggtacataacaaaatgaaggcagaaataaagatgttcttggaaaccaacgagaacaaagacacaacataccagaatctctgggacacatttaaagcagtgtgtagagggaaatttatagcactaaatgcccacaagagaaagcaggaaagatccaaaattgacaccctaacatcacaattaaaagaactagaaaagcaagagcaaacacattcaaaagccagaagaaggcaagaaataactaaaatcagagcagaactgaaggaaatagagaccaaaaaaacctttcaaaaaattaatgaatccaggagctggttttttgaaaggatcaacaaaattgatagaccgctagcaagactaataaagaaaaaaagagagaagaatcaaatagatgcaataaaaaatgataaaggggatatcactgccaatcccacaggaatacaaactaccatcagagaatactataaacacctctacacgaataaactagaaaatctagaagaaatggataaattccttgacacatacactctcccaagactaaaccaggaagaagttgaatctctgaatagaccagtaacagaatctgaaattgtggcaataatcaatagcttaccaaccaaaaagagtccaggaccagatggattcacagccgaattctaccagaggtacaaggaggaactggtaccattccttctgaagctattccaatcaatagaaaaagagggaatcctccctaactcattttatgaggccagcatcatcctgataccaaagcctggcagagacacaaccaaaaaagagaattttagaccaatatccttgatgaacattgatgcaaaaatcctcaataaaatactggcaaaccgaatccagcagcacatcaaaaagcttatccaccatgatcaagtgggcttcatccctgggatgcaagactggttcaatatacgcaaatcaataaatgtaatccagcatataaacagaaccaaagacaaaaaccacatgattatctcaatagatgcagaaaaggcctttgacaaaattcaacaacccttcatgctaaaaactctcaataaattaggtattgatgggacgtatctcaaaataataagagctatctgtgacaaaccccacagccaatatcatactgaatgggcaaaaactggaagcattccctttgaaaactggcacaagacagggatgccctctctcgccactcctattcaacatagtgttggaagttctggccagggcaattaggcaggagaaggaaatataaggtattcaattaggaaaagaggaagtccaattgtccctgtttgcagatgacatgattgtatatctagaaaaccccattgtctcagcccaaaatctccttaagctgataagcaacttcagcaaagtctcaggatacaaaatcagtgtacaaaaatcacaagcattcttatacaccaataacagacaaacagagcgaaatcatgagtgaactcccattcacaattgcttcaaagagaataaaatacctaggaatccaacttacaagggacgtgaaggacctcttcaagaagaactacaaaccactgctcaaggaaataaaagaggataccaagaaatggaagaacattccatactcatgggtaggaagaatcaatatcgtgaaaatgaccatactacccaaagtaatttagagattcaatgccatcctcatcaagctaccaatgactttcttcacagaattggaaaaaaactactttaaagttcatgtggaaccaaaaaagagcccgcattgccaagtcaatcctaagccaaaagaacaaagctggaggcatcatgctacctgacttcaaactatactacaaggctacagtaaccaaaacagcatggtactggtaccaaaacagagatatagatcaatggaacagaacagagccctcataagtaataccacacatctacaactatctgatctttgacaaacctgacaaaaacaaccaatggggaaaggattccctatttaataagtggtgctgggaaaactggctagccatatgtagaaagctgaaactggatcccttccttacgtcttatacaaaaattaattcaagttggattaaagacttacatgttagacctaaaaccataaaaaccctagaagaaaacctaggcattaccattcaggacataggcatgggcaaggacttcatgtctaaaacaccaaaagcaatggcaacaaaagccaaaattgacgaatgggatctcattaaactaaagagcttctgcacagcaaaagaaactaccatcagagtgaacaggcaacctacaaaatgggagaaaattttcacaacctactcatctgacaaagggctaatatccagaatctacaatgaactcaaacaaatttacaagaaaataacaaacaaccccatcaacaagtgggcaaaggatatgaacagacacttctcaaaagaagacatttatgcagccaaaagacacatgaaaaaatgctcatcatcactggccatcagagaaatgcaaatcaaaaccacaatgagataccatctcacaccagttagaatggcaatcattaaaaagtcaggaaacaacaggtgctggagaggatgtggagaaataggaacacttttacactgttggtgggactgtcaactagttcaaccattgtggaagtcagtgtggcgattcctcagggatctagaactggaaataccatttgacccagccatcccattactgggtatatacccaaaggactataaatcatgctgctataaagacacatgcacatgtatgtttattgtggcactattcacaatagcaaagacttggaaccaagccaaatgtccaacaatgatagactggattaagaaaatgtgggacatatacaccatggaatactatgcagccataaaaaatgatgagttcatgtcctttgtagggacatggatgaaattggaaatcatcattctcagtaaactattgcaaagacaaaaaaccaaacaccatatgttctcactcatagatgggaattgcacaatgagaacacatggacacaggaaggggaacatcacactctggggactgttgtggggttgggggaggggggagggatagcattaggagatatacctaatgctaactgatgagttaatgggtggagcacaccagcatggcacatgtatacatatgtaactaacctgcacattgtgcacatgtaccctaaaacttaaagtataataataataaaaaaaaaagaaagaaaagaaaaacacccgtatctgtttcagaagaaaaaaaaaccctaggttaaaaactgagggaaatatgattcaatatatctttcccattaatagggaaaatttaaattgctaacatttttaaggtcatacatttctaacctttttaagatgttacctttggggggaaaaaaagctctctatttgccattctcatcagcatagcctctctccctgggcttctccttggcatttgaattgtccaccatttccacctataggcctgcttctaaactataaccctgctcagatctcaagttacatcacaagagtctgtgttctggaagaataatgcactgaattttaatcatgataattsaggcttagtatctttaaatacaacatagcagatgcaaggttaaatggcagtttcagtctttgactggaattcgccttaagataagaaaagcaagttttagaacatgatcctatgagcctaggaagacagacttagccaaaatattcctatactctgcttactgtaaatgcatgtgattttggttctttcttgaaattggtgttctggtatttgcttaagagattctgagtcgtaaagtgaggagttattttaggagaaaatttttattttgtttagctaaacaattgacagcattactgcccttttcctaactactgaaacttggcaattagcattccagtgttttatgatttataaataatagttttgttacagttctcttcattaaatatgccaagatacatgtttttgtacttatgaatttttgtgtagggaaaatcatttattttatttaaaagtataagctatccacaatctctctgtgtttcaggaggttacaacacataggattgtcccatattattataaaaccaacacaattgtggtgtattaactgttaaagtaaaaattactcaatgacactttttaaagcatgataaggacgactttattcaggaacattgcaaaaggtatagggaccactgcaatgggattttgcagtagaggagagacataaggtaaggttattttcaattgaaattctatggcttgtttatcctatagcattaagagaaaaggaagatataaaattatatatggaattatagttatstatacacacctattcatacacactccagaataaaataaattcaaatgttattagttatctttggataatagcatattagatkattgtttttgtctttctgacttttctgtattttccaaatttgtagtagtaaatgtaatgtttagttagatttttggaggatgttttctttatccasaatcagaaattctgaatttcartattttaaatgaaatccttgtgttctgcttttgaagattacattattaatcacttaaaagatcttagtttgaagagaaaaatcagaatatgcttaattgacataatatattgatgctgaaggactgtgttttcttcatgttgaaaaagtgttctttttgttaccattgactacaaatgcttgagtctcagtatttctatgagataattttgttttgagtttcttttggggtgaaacaaagagaatgctaaattaatgagtttgactcaggtgttctcaaggccagttcattgacaggtgggcaagaaggcatttatagccaagaagcagagtggggctcaatggatgactaagaaacatcgagggtacaggggatgctggctaaaccagccttacaggattcttgccacaaacaggccagggtgatcagatatcacgtggggagtggtagaggatgaggaacacagtatctattgtatagggggagggttcttgctaaactgacttagcacagttcttcccaaaattggattttacatgaagtacacaaatggggctctgtgaagactcgggaccatgactaaagtttggtcaagcaaaactctttatcataacatatttagaaatagatttaaaatctgtaggatatgatatgaaataggtgagtgggggtggtaaaaggctctcttgttcaaggggtaaataaccattgctgaaaatggcaaatctgtgggagtatcttccatattagtccaggctatttgcaaacagaataacaaataacagtttatggcttgataaaaaggaaaaaaaggcaaaatgcctctcctggcttatgactataaggactctgcccaaataatccaatctcattcacacactttatcatgtaaagaagaaaagttagaaattgttaagtactggtgtctgtaccaagtagtgagtgaatgctttgtatccctgttctgaggacaatctcaaaaccttaccgatttttactcccttgctttcactagcttgttctttgatcttgggacttgtcttatcaaaatcatgtgctgttacctgtctcttcccttctagctcagacgtcacatcctcaaagaggtgttccttgactcctggaactgagccaggttcattgccaactctttgaatttccccaaagtagatctcctctcattttaacgtcacaactaaaacaagtgttactatttttaactcttggtaatttccataggagtagagatcagatctatcttgttcaccatcatagtttaatgtctgacctatagtaggtgctcactaaatgacaccagtagttagttagcaatggtgatattagcagtccaaactctgcctggataatctcatctcccttcatggatttagattatcacctatatattaggcacttccaattctctgcttcccatcaacttttctctaccaagttttagacacttatatccatgtgataagggagcagactctagaaccagactacttgggtttctattcttgactctgcccctatttccattcattacattctgtatacaaattctattcagagaagtcaaatcactttgaacaaattgtccttaatttctgtatgttctcagcctccttttctctaaaacacaggggagagaggctgtgagatacagtgtctgacataagttagtgttcaataaatgctagctcttgccattagtaccaccactactactgctgctgctgctgttgcagatgcagttattattctattattattattctcagctatttcaccctatttctaatagaaactatctaaaaatgaactctctgtctctccattgccaaaactatctctacgtctcgtattctctttcttagttcaccgaattcatcttatcaccatccacccaattacctagcagatgcctttgagtcacactcaccttctctcctgcccccagcttccactctgtaccatccagtgaatccctaaaccctgctcatgaggtcttatcaatatctcatacgtatctccttctctctatccccatggctctttttcaggtcccatcaccactagcttctttaccagtcttactgctttcagtctcctacctctgcagtccaactgttccctcagcaaatgttcatcagctactatgtgccagatattgcttacaggcttaagatatagaagtaaacagacgaatagaaaaaaaaaaatccccaccttcatggaacttgcatttcagtggtaaattatataacattaaaagtcagcaagtcccataaaaaaatacaaggtagaaagttgtggattggggtgggatgtttgcaattttaaaacggacagttaggacagatctttttgataaagtggcatatgactgaaaatgaagaaagtatggggatgagccttggagatatccgggagaagtgtgtttcagaaagagagctcacctagtgaggtgggaggacacctagttgctgaagaaatagtaaaaaggccagtgcattttgagtagaggccaaggaaggaaagaggtagaggatgaggtaagagtggcaattatgggccagatacatgaagctctggaggccactataaggatactggttttactctgagtgaaacagaagctattgtagcaatttgagcacagaagagacatgatctgactgctgcactgaaaaccgcctgaaagtgggaaagatagaagctgggagaacagttaggaggctactatggaaatccagatgatagatgctgttatcttggacatgagtgttaccagtggagacagtgagaagtgttcagagtctggatatatttgaaaattgatagctgatggattggaagtggaatctgagagagagaggtttataaaataagacaaaaataaaggatgtctctcaaatgtttggcctttgcaccagaaagatggagtaccatcagtagatatggaaaattgcagaaatcctaggttgcaatgggggtggaagggaaattattggtagttcagtttggggcatattaagtttgagatgtctattggacatcccagtgggagatcttagccagtttattttataagcctggagttctggggagaggtcctggctagaaatataaatgtaggagttgtcagcagaagagaagaaggctgaaggctgagctttaaggcattcacatgttaagaggtgagatcaaaaggcagtacaaacaaagaacaccaaaaagtaacagccagggaagcagaaggaaaacagtggtatagcacccagagggcacttgaagaaagaaattcaaggaaggattgatttaacaaataagatttagaattgaccactggattcataatgaggagagaagtttggggagaatagtgaggataaaaatagtgaggataaaaatccaattagtctgattaaaatgagtttaggagaattgtagaagagaaaatggaactaataagtacagacagctttttcaagtatttctgttataaaagaataaagaaatggggtggtaattgaaaggagaactggaatcaaagctaagttttaagattataaaagtatattatgtatgaattctaatggaaatgatctagtagagaggcaaagacggatataggagaaaaataatcagccaaggagaaaagtccttcagaatgacatgaggaattgtcccttgatgggaggactgacactttctccattataaaatgagggaagaagagccacctatgcaggtgcaactgggytggatggcaggaagataaagtagttcacatctgatagtttctgtttatcagtggaatataaagtgagatcaacagctgagaatgaggggatagaggcagtctcacaagtttgattatgaaattgctgtctcagaaaataaaaacaaggctactagaaaaacagtatttttttttctttctctgtgaggttacagtgtaaatctccaaatctgatagaaagatgaggcactcatcttcaggtgtttaccacctgtacacctgaacattttcttctacttgttcctgttatagcctcactgctacttgatgcttgctagaattaattaacaatgctatattcttggtatctaaaaggcattttatatatgttatataactggatctttataataaccttgaaaggtagagtattttgtccttatttttcaaaaggtaaaaccattttggagaggtcggataacttgcccaaaagcataagagtaataattcgcaatatctggatttcaaccctgatctgtgtgattcaaagtgttatttctatgctttgtaaatatacctctacatagaaagacattatatttcttcctttaaggatgaaaggcaagtacaaaatatttgcatctatggatgtctagcataatgcctggaaaagagtggccctctkataagtacttgtcaaaagacagaatgttttttatttaaccatcacaataacattatactgtccatttacacagatgagaactaaggctaaataactcactcatgatcttatagcaagttagaataagtgaccaatttgtaacactaactcagatcatctaactcctaagttctcattacttgttacaggcaaaattgtgtccctacaaaattcgtatattgaagtcctgagccttagtacttcagaatatgactgtatttaaagacggggtttttaaagaggtaattaagtgaaagtgaggtccataggatgacccttaaaaaagatgactgttgtccttacatgaagatgaaattagtacacaaacacacgcagagagaagacgacgtgaagacaatggggaggaggtgaccatctaccaaggaaggagagaggtttcaggagaaaccaaccctgctgacaccttgatctcagtcttctagcctccaaaactgtaagaaagttaatttctgtggtttaagccacccagtctgtggtactttgttatggcagtcctaacaaactaatacaacatctctcccactattgtagaaacaaagcatttcacttcttccatgggtgtcaatatgttgaattactaactcaatatgttgaactatatggccttctgagaaataattcagttgtgccaaagtccccagcaatcataatcacttaataaatagttttggataaataaatcattaacaaataaatttgcataacaaagataagcctctaattgctccagatcagacttccttgaactggagaaatgagtgactcygcccatcaatgaactgaccttgagaacacctgagtcaaaytcattaatttagcattttctctttgttccatcccaaaagaaactcaaaaaaaaattaccctatgtaaatactgagactcaagcattggtaacaaaaagggcactttacaaacatgaagaaaacatagtcttttggcatcattacattatgtcagtgaaggatattctgatttttctcttcaaactaagatattttaaatgattaataatgtaatcttcaaagcagaacacttggatttcatttaaaatattcaaattcagaattcctgattctggataaagaaagcatcctccaaaaatctaactaaacattacatttactactacaaatttggaaaatacagaaaagtcagagagacaaaaacaatcatctaatatcctatcacccaaagataactaataacatttgaatttattttattctggaatgtgtattaataggagtgtatacataactataattccatgtataattttatatcttccttttaatgctataggataaacttatttgcaaatcttttaaaatctgtatacaatttgcacagtagctacaccaaactttatgtaaacattctttttttggctttgataaaaataattgatctcatcacatgatcctatatgtgaaacaaccttgtgggggtacatacatataaaatatgctttcttcaaacaaatgctaggctataaaaaacgcacaataagataacttctgaggcaggtgtggaggaaggggcttctgagaagaagtactgtcactctctactgcatgtacttctgtgttatttaaggagcattcattatttttgtaatttaaataatttaaaataacactgcagtgaacatatttgtgtataaaactcttcctaaatttcaaattatggtcttggtataaattcccagaaatgtattattaaatcagagggtctgaacattttgaagccttttgataaaaactggcaaattgctttcctaatgagttgtcatgagtatattcttgaggaaaatagtaaacaattgaaccagaaagaaatatttctcatcacaaatttaaatgagcttggctcaccacagttcaattctaaatacatacccttaccccttttcactattttctctcactgagaaagctgaactagataatcatttcaatataatgtacatatacatagtgcattatactggaatgattatctggtttgaactttgaactagataatcattccaatataatgaaatgaaaggcttattttatayataatatgttgttttatatataatatgttataacatttttatgtaatattataacactttatgttatgtagctttatatataatagtttattttatatatattataacatacataatatatataaataagtctttcattttaatatcactaaaaaagcatacttataaaatattatatatgtatttagtctgcttgacttttaataaacacttgaaartctttttctgattataaaaaactgtgcaatagcttttaatatcaggttattttattgatttaaaatgtgaaatacaaatagatgtcatctttgttacaaaatatctatttccatagttaatttgattactttaaaattctaaaataaacttaatgatgatctttggatgtttcaaatgatagattgattagaacaaattttattcagagcatgaaataattaggttggtttcctattttcttgaaagataattatcagattattcaaagcgttttatggatgtgttatttttgctttaatgtggtcaataggtctagacacagaagttaaaaaacagcacaaaaagttcaaatagttggttgtattttaagcataaaaccaaggagagtagcaaggtatcatgaaaagtgtccagggttttgttatgggcagacctgagttcaaatctcaactttgctgyttattagctttgtgacctaaaagttattagaagttatttaactttgcttagttttagtatttttcatttatagaatagaagaggaaaacaactgcaatggcttttaacactgtaacttaattgatgcttaataaatggtagctatttttatcatgctgaagacaagaaagatgtgtgctatttcacattttttaaatagaaaataaattatagtatctattacctgaattctatagctatgctcacatactagagactattttatttccatctgcacataagaatttacatatatatagatattttctcattttcattctctgagatctgacatataattttatatactaatttcaaatataagtatatttaaatataaagtttttaagtaacatgtaaacagtgtgtgtgtgtatgtatgtgtgattataatagtcctaaccatattcattcattcaacaaatattcattgaacacttttacatatgctyagtattgttctaggaatcatggaaatcaagaagtcaaaaaagtcaaaaaaagtgacaacaattcttacctacatagaacatgtattcaaatgcggggcggggaagcagtgaaaaggcaaataagtaaaaaatatagcacatattaaaaagtgatagctgctaaggagaaaaatggtcaagaaagtgagataaaaattgggggggttgcaaatttagaatagagtttagaaaagaaggccttactgatatgccatttgaataataacctgaagaaagtgaggaagccagccacatggatatgaagtaaaagctttccaggcagagcaaacagcaagtgcaaaagtactgaggtggggacatgcctggaaaagccctataaatgccctcatgggggtattatgaggattaaatgaatttagcacatgtaaaacaccaagaatgtatctgctacatagaaagagctccataaattttagttattatttgcagttcttagcattagtcattttatttaaaaatcattaagtaatatttttatatttgtttcaaaattttcagtttctatccaggtatttggaattatgtatacttagcctcatatcatttaggccattgtgtaaataatttctagttttaatcatatgtaatataatgacatattctaaggtaagacaggttctatccctcctttcctactacatttaaagttcttgatttctcctgtatctagcacagtaatgacgtacactttatacatgtttataaagttttcttcattgactgaaggaatgaacatgctattttttggtaactacttacagtttttgcagattgtcctcattcactacacgacagtttaactgtgttttctcatgcagattataagttggaaagctctcattagctcattcattaatttttatgattgcctacaagtatcattatttagtgcaatataaatatggtgaaaagatgctattcatgtagggagagctgttataaatcaggaagcttgttagtgattgccagttgaactaagatctgctatgttttactacatttcagaaaataaatccatctggccttgagttttactatttcttttatctatttgctaaaggttgattttgcattaacaagaaattataaaagtaaagacttgaatatgtctaacattttgaatcagcttatttatattagcttccagaagcaaagggtaatactcataaggtcaagactagtgttgcatttagaaactgtataagtcacagtattatctgggtgaagtacaatgaacatttgtttgacaactttgacatctgcttcgccgtactagaaactcttaatactggaatccgcaagcacaaatatacatctgtttgactcaaatgaatattagttgaagaataatgacctgaaaactagatatcccctgagggtagttttataaaattaccaagctgttttgttttctatttaaagtgtgtttgacatcagaaaagactacattttatatagcagaaatatgagaaattagtctaagtagtttttaggagaaaatatgcattcttaatgttactgttctgagcatggttgagtggtagcatgtaacttttctgtacctaaaatttcacagtaaaaaattgaagtgctgtggtaaattattattaatactgtattgttctatgaaacaaactaagagatttaattttcgccattagtcgaggaccacagtaatttcattgtgtgagaacacaataaaaccaccacagcaccagtaatttgggaccaaaaaatctgaaaaaatatatattatggaaataattatttactgtaaagcaaaacttcttaaataagtatgttgaggagaaaactactataaatcagactttaagagacaataagtcccagaggacccaagaaatataaatcaagacaggaaatgtgattgtaaaacaaagagcaaagaactgtaaatcaaggctggatattccctaagagagacacatgaagcactggaaggattttagtcaaaaggtaggagagtttgtaccatgacggaaaagaatagggctaaaatttaaatatcagatagggaagaaactgtttataagacgtgtggtttgaactcagtaatcactacacgtttctcatcttcatattcagcccattgtcctccgtctcaattgcactttcatttctgtgatcctgctctcccaaacactgctatggctcctccccacttaactctgccctattgcctggccatgtacccaaccaacctcctcactgtgtcttccgcaaagcccccagaacctactactttgttattatcaaggtctcatttagccttactgtttccattcagtaggtcttccacatcctcatgttgatttacagcttacttgctacgcatgacacctcttgctttggctactgtcatgtataggcctctgggtcttgcgatccatgtatgatgcagtttcaatcctctaccactgatgtctctttccattgcattgacttatcacttctgttttaacactttttgaaatccatgattttaaaatacaaacatcttgccacgcctcccagtccttatcactttacaaacattcctccatattctaaagttcatggttgtattatggaatcaaaatttttctttctcctcatccattttcttacagggcatcaacgtcgaccacccgtttaactgtcttcagagttacttcacttatcatatttgatgaacttgcttttcatttgacctcaggcactcacacacacatgacagtattgtgaatttataattacccggaaatgctcaccccgaagatcttaaactccatatatttgtatcaaagaaatgttcaraatggtggccggggcggtggctcacgcttgtaatcctagcactttgggaggccgagacgggcggattgcctgagctcaggagttcgagaccagcctgggcaacacagtgaaaccccgtctctactaaaatatgaaaattagcccggcatggtggcgggcgccattagtcccagctacctaggaggctgaggcaggagaactgcttgaacccgggaggcggaagtcgcagtgagccgagatcgagccactgcactccagcctgggcaacagactgagactccgtctcggaaaaaaaaaaaaaaaaatggttactgagcgccatggaagggcactggaggctggaaagactttgtcgtatttttcatagataagacttttagcctcaacctcgtgtattttttaattcatccagaatttacctaatactcatttattgtaggactgggctataatggcacaatcgaaatgcattaaatcaaattgtaagaagagtaatttatgttaagacgtgtagaaccaaaagactagaatgcctatgtctatttgtcagtgcacgtttcttctgtacacataaaataattactgcaagtttgctttagtaaacaccagaggaatcatcaaaaggaaatgaacaataatgaataccataagtgaattaggatagcttggtacacccatctcctgccatgctctatggtcaggatgatgcctgtgttagacggtgctgaaaaatcaccaacaccttgtcattgtttggctctattttctctatgtgtgtrtattagtccttcaacagacagttactagagaaagggatcaaactagttgattaggagacagccagagagcatgggactagaagagtgtccactatgccattttcttagccatgtggcttctacaagtcacttagcctctctaagccgctcaacttcttaaatgtgaaaagacaatgctatcttcctcttattagctatgtgaccacttaatgagataatgtatttgaaaatgctctgtaatttgcaaaactttataaaatggatatatgcatatctgttttaacaaacatgccaagccaagcaacatactgagattccttggtaaaaccacactataacttcacaaagaaygtatttacacactgcttaagatggatttcttatatgtaaataaccataatcattccatattaaagcttatgaaattctatttccaaaggtaacatattccacatgtttttcccagctgatgaagtataacctaagatctatatactgaccatgttccacccttctacatcatccgttctttgcctcagctggctgatctttgtcatcttccacacttgaccttcttgatttcttccctttacttagctggcttctctctcaaactgtctgcttccacatcagctgtcagcatttcctcactttgcattcagtttcttccactgccgataatcaactgctcaatttaacacttttaaaacttatctctgcaaaaataagaataacctcctaattatctcactcaatactctctttccagcactcaggctataagacgttgctgcaggatttgatacttcttaaaacctctcctcccttggtgtttacaacaatgaagaaaactgagttgacattcacatagaaaaatgaaagaaactaaaatctttttttgtaattatactttgagttttagggtacatgtgcacaacctgcaggttagttacatatgtattgttttaaagcattagcgaaaactctcaaataattgccaaatttcaggtccacttttcacctcaaatttgaaactagaagtgcaatactctgccataaccactgtcacaattctcaataacttccaacatcctgctcaaatatcagtttgagcttttcctgcccttttaatcactccctcctctataatcccaaattttggcttgtaatacagcatatatcagacccagaattgtagtattttacgcgtattaatctacctttacaggcttctacagagtccatgcaaacatgcaattcgttccacattatagatattcaacaatggatttttgaagaaaaaactgatgtcataatgcattaacccactctatgttattttcctgaaacatgctattatgcaaaaaatactaaaattattgtaaaatcaaagacatgtatcttaagattattcaatggttttacaaatattaggcaattcaaatttggatatttgataaacactgggtttctggaatttagagacaaggattttaatgtgactgttttaatgaagcaacacaagtgctaatatttttatttatttcacaactgaattgaagtaaataattatttccatcagtaatgggaaataattcttttctgaaaagaagtagactagtttgtgggctcttagaatcyttcacacactatggttgaagttgattggcttatcattccaattcttgtgaacaagtgacagagagtttgtgggctacacatcaagtttaagaactcaggttataatctagttccaaaaggcagacatagcagatgacggtcactttcacttgagactccaggaatttggtctatttagttcattttgtatatatgtgcttttgttggaagccaaggtggatttgttccatgccaaaaatcaattatcatccatattttaatttactgtccagaagaagatgcagtgccagatgctaccgaatattagtcactttcttatttcaaaatgaaagacaggggagggggaaagatgttggtcaaagaatacaaaatttcaaaatttcaattagataagtggaataagttcaggagacctattttataacaaggtgactatagttaataacaatacattatatctttaaaatttgctaaaagaatagatttgaaatattctcaccacagaaaagatatgtgagataatgcatatgataactggctcaatttagtcattccacaatgtgtgtatatatatatttcaaaacaatacgttgtacacgatacaattttgtccatttttttaaaaaagaaaaattttaacacctttcttctattttctatttttaaaattactggattctgcttatatttgatctatgcttactataaaagtttacgggatatttttggtaactgcactttcaaaactcttaattataactcttgtacatatgctgataagagtaattagtcaaatgttttcaggttcacttttcaactctgtcaaacacttttataagctatcatttggatcattttttctctcctccttcaaaaaattatagaaatcgctgtgaattccaaatgcgtgtctgttttattctgttaaatcagatacttatactgacaacctatcaatacactaaattagtacatgtagctaacaagcatgtacaagtttaactgctgtataacaacatttaacagatcaacaaacacaacagcttgtctctgcagggtttaataaaccatatttatccacagcatctgagaaaaacagaagagactctgatatatgttatgttctttttataagtacatgaaaataaatatgtaaaagtaaatgtggtttctatttctattcgtgagagtagaatgtactaactgaggtcataacttgaactgaggtttcattaagggggaaagcactttgtcttttatgttctaaaatagacttcttgataaagaaaaattatgcttaaagattaattaataactggctggcattataaagtgttgcaatgttaaattataataaatattgattttaggaataagttttgaatattttatttttacattttctctgtaaatttgtgttagtccatttaacttcaaaagtattcttcaccacattatttaaggatcacacttaataattttccactaaaagaatcctgtttaacagaagtaatatgatgtgataggttaaaagcaaatattttgatattaggcaagcctgggtttaagccccagttcttccacttgttaattaagtggccttgagataattcctctgtcttccttaggcttaattccctaacttgcaaattggtgaccatgacagtttctgttttcaatggctgttatgaaaattacatgagaaagtaggtaaagtgctaagtagggtgcccatcctataacgtcctataattagcttcaactcttacacctcctcaacatctgttgctgttataattgttatttattactattgtaacaccaatraagaaatactgttattgcaaaaagcatttgagaaattgtgaagaaaattaccaattttttaaaaggcaagttgaggtgaaagaagaagaagctaaagcatttggaatgagttcagtaagtttggtgaartaaagacaattgaacagatacaattagaccatgtcaaaattgttaacattaatgtaaccccaattaacctttttaaaaatataaatagccataaaagttaattaaggtatttactctctttaaggagggagaagtacaggtgaggacgtattaagacactgaaagggtagaaaggatacaggtgctgagcagttgttatgcaagaactatgctggatgtactttcctcagaacacttccataagatattaatatctatattttgcaaataaagaatctgaggttcaaaatagccaagtagtttgtccaaaggtcacatagctagctaattgaagaagctggaattaaaacccaggtttttctaagccaaaagccctttatagttctgtcttcagttgtgtgagattatgaatccaaaggtggaaccctgagtatgaaagggagagtcctgaaataggaaaagttaaakaactgaagaaggcttttatgttttactcagatttttctctttaaaattggttataagttatgacataaagtttaaaatattagatgatattccaactttctctgttttgatgttataaaaccttgtgaactgggactccaaaattattgacataagctgggaatttattctaaastgtgacatatttgctctaaactagacttctaaccaactgaaattcaatgacttctgaaatgtgggttctcattcaactagacaaaatgtgtcagccagaaatgtatgacacagtggaggccagaggtttttacagcagcaagtccctaaaaaaacaacaggatcaaatatgctatttttaaaaaattacccaaagatagtttaaggtctgtgctcttagtataattcccttttgtctcactttacattkggatactttcaaatctcctgctaagtggattgacattacaaatgactctaatacagagcaggtttttcctgaactttcctagacagtcaagtggagagatttctaaatataaaccatcttattcatggtttcattgctgtatataaataaaacctgtcccaaccctgtatgaatttttaaataattttcattaataatctcttgggcagcttcagtctcactgtgaaggattcactcttgaacatttcgattgactcaattaattgtcaatcttatttagaagttctaaataagagagatagctattataatttgtgaatgatgcagctagagttgcaaagagtagctcattccatacttcatcactcatttttcagggtatattaacaatgtctttacaaaggtttgattatatttctaaaatgaggtaactctagaaagaaaatatttttgaagctgttcctctctctttttctcactacaagctctgtcccctaaggcaattttatctgagggttcagcacatcatctaaggatataaagtagtcttgctgcttaagcaaatgaggcattaaggctgttttgtattcctgtgggctatcactgtctgtactgacaatgcagtggtgcctgctgcttgagataggggtaggaagggtggtttggaaggggattgcacgtgtgtgccataatgaatctgttttatctttgaacaattccatatgctcttgtgaagctatcaattctttcttttcctttttttttctccttttaatgccaagataaattgatcctagattgctgctccaaatgctgacaccactgaatatgaaggtgtcattgtaaaatgaaccatagcaaattcttaataagcaagcttcacaaagagttatagtttttgacattcagatatagacttatccccagtgaaggaagctttgttcagcccatgcatgctaagaggaataaaaaataaaaagtaatttgattggtattaaatatgttttattccttcctatattgagcaatcatatcacatgacttgtccacttccatcttacaggaaaattggaaaaggaatgatttcaaatcaagaactttatttctaaaaaagttggaacgagtttagagctaacgcttccagtgctatctggaggagatttaaaatctgacttccttgaaaacttcaaaatcagttgtgtctgagaaaaacaaattagtaaattctatagaacatatgctataaaaacaattactaaagttttctaagctgattatttcaggctaatttctcttctaaaaattagtatatcctagggagcctactttctaaattaatgggagcaaatgcttagaaaacacttttatacttgataactcagtttggaaaaaaagaatatgggaattagctctatgatgattattacaatttacattatcttgaacagagaagaaacagaccattttgataagttcaagaacattaacttttttttctctttacaagtcctgcataaaaactcctcaatggatgttgctttaaaaatatataaaaggcaggtgtggtggcatatatctgtagtcccagatacttgggaggctgaggtgggagaattccttgagctcaggagttcaagtctatcctaagcaaaatagtaaaaccccatctctaaaaatacatatatattttttaacatacagatatgctacaaatttaagacrgtttattaatttatatgtacaaaagcaacctacatatttaagataatataatcagtaattataatataatataatcagtctgatatgaagttttgtcttatatttccagctgtgagcaactttaaaaggaattcattaactaactttattacagtatttccagaaaatagttattctgtgccacattggtttggtgatgcttgattagacttttattatgaaatcgactcttgtgtctccaaataataactgaaaatgcaaacatttcaaaaagttttaaccctagatatattctcagtataattcaacctgttatatataaattggctttttgtaaatagattccatacaccaagaatgtctagatttcaatgcattctgcattaagtccttctgtaaaacaaataattgttttgcttattaatcataactttggatatctgtttgcaaattggcatcatatttgctcacagttctgcaattcgtctttttctctaaacattgtgtttttgaaatttatccatgtttatatacaggtagctctagttcattcactttaaatgcttcacagtattccatcgtaggaatgcattaagatgtgcttattattttattcatgggtayttgtattgctttcatctatttgctgttaccataatgctaaaaaaaattattgtacatatctcctttggcatgtatgcaagagtttatctgagagaatatacctgaattggaaacacggaatttatggcacaccttcaacattaatggcaaatagcttctgaaagtgtttgtatcaatagatactacctcagcaatttctggaagtttcccctgctcattcatttgttcatttaataaatatttattgcacattcatgtgacagactgtgttctagaaggggatgtatagcagtaaaccaagtttataaaactctctgtctaaatgcagtttgcattctaatgtggggagacagaaaataaatataaatacataatatctcaattgggagaagtactatggataaaaatgaagcaaggagaggaataaagagtgctagaataggagatgcaattttaaatacagagatcaaggaaaactgtactaggaggtgatatttgagcaaataactgaaaggggtgaaggaaaaaagctatacattttcactcttacttgatattatcacactggttaacttgtgttagataaatgaaggtaaaaatttgtctcattaggatttttaatttttttctgacatcaagcatgtattcatgttaatttaccgtttgtgttgtccctattgtaaattgctagctaatattttaactcatttttctaaagtgttactttcctaattcttattgaataggagagatccattattaaattttgggggtatatagtaggtgagtatatttataaggtacgtgagatgttttgttacaggcatccaaagtgtaataatcacatcagggcaaatgaagtatctatcacctcaagcatctattatttctttgtattataaccattccaattatactctttgagttatttttaatgtataataagttatcattgactgtagtcaccctgttgtggtagcaaatactagatcgtatttatttttttttatatgtactttaagttttagagtgcatgtgcacaacgtgcaggttagttacatacgtaaacatgtgccatgttggtgtgctgcacccagtaactcgtcatttaacattaggtatatctcctaatgctatccctcccccctccccccaccccacaacagtccccagtgtgtgatgttccccttcctgtgtccatgtgttctcattgttcaattcccacctatgagtgagaacatgcagtgtttggttttttgtccttgagatagtttgctgagaatgatggtttccaccttcatccatgtccctacaaaggacatgagctcatccttatttatggctgcatagtattccatggtgtatatgtcccacattttcttaatccagtctatcattgttggacatttggcttggttccaagtctttcctattgtgaatagtgccgtgataaacatacgtgtgcatgtgtctttatagcagcatgatttataatcctttgggtatatacccagtaatgggatggctgggtcaaatggtatttccagttctagatccctgaggaatcgccacactgacttccacaatggttgaactagttggcagtcccaccaacagtgtaaaagtgttcctatttctccacatcctctccagcacctgttgtttcctgactttttaatgatggccattctaattggtgtgagatggtatctcattgtggttttgatttgcatttctctgatggccagtgatgatgagcattttttcatgtgtcttttggctgcataaatgtcttcttttaagaagtgtctgttcatatccttcacccactttttgatggggttgtttgtttttttcttgtaaatttgtytgagttcattgtagagtcttgatattagccgtttgtcagatgagtaggttgcaaaaattttctcccattctgtaggttgcctgttcactctgatggtagtttcttttgctgtgcagaagctctttagtttaatgagatcccatttgtcaattttggcttttgttgccattgcttttggtgttttatctttctaactatatttttgaactcattaattatccccacttcccttcttcccaccactaccctccccagcctctggtaaccatcatcttgctctttatgagttcaatcgttttcatttttagctcccactagtaagtgagaacatgtgaagtttctctttctgtgcctggatttttttcacctaacataatgaccttcagttccatccatgttgtttcaaatgacaggatctcaatttttatggtcaaatagtactccattgtgtatatgtaacacattttctttatcaattaatctgtcgacggacacttaggttgcttccaaatcttcactattgtggctagtgctgcaatatacataggagtgcagacacctttttgatatactgttttcctctcctttgagtatatacctaggagtggggtggctggatcacatggtaactctatttttagtttttaaggagcctctatactagtctccataatggctttactaatttacattcccgctaacagtgtacaaagattccttttgctccacatccttaccagcattggttatagcctatcttttggataaaagccattttaactgggggtgcaacggtatctcattggagttttaatttacagttctctgatgatcaatgatgttgagcacctttcacatacctgtttaccattcatttgtatgtcttattttgagaaatgtctattcagatcttttgcctagtttttgttttgttgttgttgttgttttgtttcttttttctttttttttttcttcttcctgaaacagagtctcgctgtgtcgctcaggttggagtgcagtggcttgatgtcagctcactgcaacttccgcctcccaggttcaagcagttctccctgcctcagcctccctagcagctgggattacaggcacccaccaccatgcccagctaatttttgtattgcccagtttttaaatctgattaatcgatattttcctatagagttgtttgagctccctatatattctggttattaatcccttgtcagatggatagtttgcaaatatttttccccattttgtgggttatttcttcactttgttgattgtttactttgccatgcagaaactttttaacttgatgcaatcccttttgttcatttttgcttggttgcctgtgcttttgaggtattattcataaaatctttgtgcagaccaatgtcatagagtttttccagtgttttcttttaggagtttcatagtggaggtcttatatttaagtctctaatctattttgattcgaattttgcatatggtcagagataggggtctagtttcatttttctgcatatggatatccagttttcccagcaccatttattgaagagactgtcctttcctcagtgtatgttcttggcacctaagttggaagtgagctcactgtggatgtatacatttattcctgggttctctattctgtaccattagtctatgtgtctgtttttatgccagtaccgtgttgttttgatcactatagctctgtagtataattggaagtcagttaatgagatttctctagttttgttcattttgcaccagatgactttagctattctaggtcttttgtggttccgcataaattttaacattgttttttctatttctgtgaagaatatcattggcattttgatagggattgcattgaatttatagattgctttggatataattgacattttaacaatattgatacttccaattcatgaacatgaaatgtctttccatttttttacatcctcttcaatttccttatttgtgtactattttttatgtcctcttcaatttccttcatcactgttttatagttgttttacagatctttcacttctttgattgagtttattcctagatattgcatcttatgtgtacttattgtaaacaggattatgttcttgattgctttttcagattgttcactgttggcatatagaaatgctactgatttttgtatgttgattttgtatcctgcaactttactaaatttgtgtatcacctctaatagttttttgtggagtctaggtttttccaaatataagaccatatcatctgtaaaaaaaggataatttgatttcttcctttgcaatttggatgccctgtatttctttctgttgcctgattgctctagcaaggacttccagtactctgttgagtaacagtggtgaaagcaggcatccttgccttgatctagatcttagaggaaagactttcagttttcccattcagtataatattagctgtaggtttgtcatatatagcttttattgtattgaggcatgttctttctatactcagttttgtgggagttttattatgaaggaatattggtcaaatgcctttttatcatcaattgaaatatcatatgatttttctccttcgttctgttaatatgatgtatcacattgattggtttatgtgtgttgatctatccttgcatcgccggaatatatcccacttggtcatgatgaatcatctttttaatgtgttgttgaactcagtttgctggtgtattgttaaggattttgcatcagcattcatcagggatattggccagtagttttccctttttgttgtgtctttgtctagcttagtttcagggtaatactggtctcatagaataagttgggatgtattctctcctactctattttttggagtactttgagaaaaattggtattagtatttctttaagtgtttgataaaattcagctgtgaagtcatcaggttctaggcttttctttgctggaagactttattacagctttgaactaagtacttgttattgatctattcaggttttgaatttctccctgcttcaaccttggtaggttatatgtatctagaaatttatctatttcttccagattttccaatttgttggcatatagttgctcatagtagtctctaataatcttttgaatttctacaatatcagttgcaacatctttttcacctctgattttatttatttggctcttctctcttttttcttagtttgtctggctaaaagttttttgattttatcttttcaagaaattatctttttcttttattgatcttttgtattttttgttccaatttcatgtgtttttactctgatctttattatttctttcctcttactaactttgggtttggtttgttctttcttttctagttctttaaggtatatcattaggttatttatttgaagtttatatacttttttatttaggtgcttattgctgtaaatcttcctcttagtattacttttgctgtattccaaaggttttggtatgttttgtttccattttcatttgtttcaagacatttttaaatttccttcttaatgtcttcattgaccccactgatcattcaggagcatattgtttaatttccatatgtttgtataattttcaaaatttcttttgttattgatttctagtttgattctatccttgtcagaaaagatacttgatatgatttcaattattttaattttttaagacttgttttgtagcctaacttatggtctactgaatgaaccatgtactgaagagaagaatgtatattctttagccattggatgaaatgttctttgaatatctcttatgtccatttggtcatagtgcaractagtgtgaaacactagtccagtgtttctttgttgattttctatctgaataatctttccagtgctgtaagtgggctgttgaagtctccagctattattgtatcaggggtttatgtctctctttagctctaataatatttgctttatttacctgtatgctccagtgttaggtactgaattaacccctttatcattgtataatgaccttctttatctcttttcttagggtttgtcttgaaatttattttgtctgataaaaatatagctacttctkatcttttccgattcccatctgcatggagtatatttttcgatctttttatttgcagtctatgtatctctataggcgaagtgtgtttcttgtacatgagagattgttgaatgttgtttttttaatctatttatccacgctatgtctttttattggaaagtttagtccatttacattcaatgttattattgacaagtaaggacttactactgccaatttattatctgttttcagattgttttgtggtcttcccttctttcctttctttcctttctttccttcttccttccttctttcctgtcttctttttgaggaaatgatttttctttgatggcatattttaatttcttgctttttattttttctgtatctgttacagagtttttgatttaaggttatcatgaggtttgcaaataacatcttataacccattattttaaactgatgataacactgattgcaaaaacaaacaagcaaagaagaaactaatgaaaactacactttaacttcatcccttcttttaagctttcagtagtttccatttatatcttactgttttaagtcttgaaaagttgttgtagttgttatgtttgacagattcatctttcatctttctactcaagatacaaatagtttgtacaccacaaatacagtgttataatattctgtgtttgtgtacttgctattactagggagttttgtacattcagatgatttattattgcttgtttacttccttttctttcagattgtaaaacaccctttagcatctcttgtaggacaggtctggtgctgtcaaaattccttggcttttatttctcatggaaagtatttctcctttgtgtctgaaggatatttttatgggatataccattctaggataaaaggcttttttccttagcactttaaatatgtcatgccactctctcttggcttgtaagttttccactgtgaaaccagatgtattggaggtcatttgtatgttatttattccttttctcttgcggcttttagaatcctttctttatccttgacctttgggagtttgattattaaatgccttgaggtagtattctttgggttaaatctgtttgatgttctataatcttcttgcacttgaatattgatatcttcctctaggtttggaaagatctgcgttattgtccctttgaataaactttctaccctagtcttactccgtgtctcctctttaaggccaataacttagatttgcccctttaaggctattttctgtatctcttaggtgtgcttcattcttttttcttttatctcttctgactgtatgtttaaatagtctatcttcaagctcattcattcttttttcttcttgatcaattctactgttaagagactgatgtgtgtcagtatgtcagttgcattttttagcaccagaattcattaatttttgttaattattttaatctctttgttaaatttatctgatagaattctgaatttttttctctgttatcttgaatttcattgaacttccttaaaacagccattttgaattctctgtctgaaaagtcacaaagctctgtcactccaggattggtcactggtgmcttttagtctgtttggtgaggtcatgttttcctggatggtcttaatacttgtggatgtttgtcaatgtttaggcattgaacagttaggtacttattgtagtcttcatgatctgggcttgtttgtacccctctttcctggaaaagttttccaagtattcaaaggaattgaatgttgtgatttaaatcttcggtcaatgcagccatatatacattagggggcaccccaagcccagtaatgctgtgaccttgcagcctgttagaggtactgccctggtggccttgggtaagatccaggaaatttccttgtattacaagacagagactcttgttctcttcctttacttttcgctaaacgaatggagtatctctttctacggtgagctgcttgatgttgagggacgagtgacacagcactgctgtagccaccatcactgggactgtgctgagccagacctaaagccagcatagtactgggtcttgcccaaggcctgtaacaactattatctggctacaactaatgtttattcaaggcccaagggctctttggtcaacaggtggtaagtacagccaggcttgtatcttttccttcaggacagcaaattcctttctggcccagggtgggtcttgaagtgctgtctgggagccaggacctggagttgagaactttagaaatctatttggtgctttattttactgtggctgagctggtacccaagttgcaaggcaaagtcctttttactcttccgtctcctttcctcaagcaaaaagaatctctccccatggccaccactgccccaggcccatggtgagtactgcctggctaccactgatgtttattcaaggcctaagggctcttcagtcagctggtgttgaatcttgccaggactgaatctcccccttcagagaagcaggttcccttctcacccagggcagctgtagaaatgctgtccaggagctaaggcctggaatcagggatttagtgctttaatttactgtgtctgagatggtgcccaagttgcaagacaaagtcctttatactccttcttccttttttgtcaagtagaaggagtctattttcatggctttcccacctgggaatgcactgggtcagacctaaagccagcacggtactgggtattgcccaacacctgtgccaagtactgcctggctactgctgatgtttattcaaagtccaagggctttttagtcagcaagygatgaatccttccaggaggaaatccttctcctaaaggcagagggttcccttctggctcagggtatgtctagaaatgttgtctgggagctagggtctggaatagggacttcaagactccgtttatgctgtattttactgagattgagctggtatccaagttgcaagacaaagtccttgcccaggaattgctgttcttttggcttagactgcctttcaagcttatttagaaccccagagcacttcagcccacggtggtggggcttgataaaactcaagttctgaccagtgggatggatgattcccctctggctagggatggtctaaatgctacctctgtgtgcgccagctgaattctgccccatattgctctccaccatgacagggtagcactgagttccagtgcaaagtcccacaatcagtgctgtttccatcctgcaagcacacattctccatctgcaccmcatggctgctgctggggcatgggcgggtggtggtgtagacaattcaagactgtctttcctaccctcctcagtgcctctttcctcgatacaatgttaaaatcaggtactctaagtgctcacctgatgttttaatcttatgaagctgttttcttgtgtggatagttgtaccgtttggtattcctatggtggggacagttgctggaaggttctattcagccatcttgctctgcctgtgctctgagagcttttcagtttttttgttgttgttgttgttttaatacattagggataagattcctttgttgttttcatgtgttacaaatatcttccaccatttttggcttaactttttacatatttacaatattttttcacacagagaagttcaaattttattattacttttattgaatttgccaatcttttcataatggtttatatttctttcttatttaagaaatcaatccctatcttatatatttttctccaaatattcttatttctgttctttttcacattttatctttaatctacttggaatctatcttttagtgtgctgtgaaatagtgatgcaattataagattttcttccatgtagataacaaattacactatcatcatagttgtatttttaatgtacagattgtatctctgcttaaatgtaatttgcagaaagaatgtcttaaccattcccattgagttatatcccacttttatatgtgctataatgttttataattctccttcttaaaaatcaaaataattttaaataattgattattcatgtaattatttattaatttctggtttcaccccttctcctccccaaaattataaatttcatgaggacataaaccatctctcacttaaatctataaccttggtcctgacgtggtacgtaattcagaataaatgcctgtgaaagtattcractgatacataaataaattattttatttccataatgtgtgagatgaaaatacattgatttatgatgccttgagtttttaacaaggctgaaaataaccttaaattttccacgatttatgtgatactgagtaaacgctactgcttgaactcttattataagttttttatttgtttctaaaaggcttccacttacacagctggcttcttccatccaatttgtaagggtataagagatacaataggtatccagtatgcaagtcagtaagacatgtaaaatctgtgacatcgcatcctacctcccacctggccaatttatctacaattacatagaactgtatatgagccattttcctgaatataagagttttttgttatgttttgtttttaccttttgggttcttgaaatgagttcaacttattaaaatttgggaaattctttccaaataatttagatgttagacaatgaatttytaatgattctcaaggtattacttctttaaagttggaacagaatgtgtaataatcttttctttttcagtaaataatataagttcattttacaaccagttgctcacctctagcctagagtaccttcaatgtttccagaattctgggctgtcagtttttgacattttaaagtcttatcctgacagtttgtttgttgttgttgttcattttctgccttttaaaaaaatagttggggagttcaggtggacttcataactttgacagagatcttaaatgtggaatttatttatttatttatttatttatttatgcattcaaatatttaatgagtgcttactatttcccattgattattctaagtggagaagatacaatggtgaaaaagacatgcaaaattcctgcactgattgcgcttatattgttctagggaggtacattacaaaaaaaaaagattatataatgttaggttgtaagaaaaatagattattgggatagagagtgacaagcagggtgcttttttagatagggttaccaaggaaaagaataaataaaccctaaaacaagagttttactttacaatcctcaagagcaaatctggtgaatgtcctaatttactagtatcaaactttttcactcaaaactccagcttaactaattcacacctgttctttcccaaaactcttcatatgtttccattttctccatccatatatttgtaaaagttaatactgcatcctcaatctatgttggtattcatatgctttttcttatactttgccatcttttcatttttttttattgkaagttcaggggtatatgtgcaggatgtgcaggtttgttacgtaggtaaacatgtgccatggtggtttgctacacagatcatcccatcacctaggtattaagcctagcatccaktagctattcttcctgatgctctccttcctcccccacccccaacaggccccagtgtgtgttgttcccctccctgtgtccgtgcgttctcattgttcggttcccacatgtaagtgagaacatgtggtgtttggttttcttttcctgtgttagtttgctgaggataatgtcccccaggtccattcatgttcctgcaaagaccataattctcattcctttttatggctgcatagtattccatggtttatatgggccacattttctttatccagtctatcatcgatggacatttaggttgactccatgtctttgctattgtgaataatgctgcaacaaacatatgtatgcatgtatcttcataacagaatgacttatattcctttgggtatatacccagcagtgagattgctgggtcaaatggtatttctgccgctaggtctttaaggaattgccacactgtcttccacaatggttgaactaatttacactcccaccaacatttccttttgctccacaacctcaccagcatctgttgttttttgactttttaataatagccattctgactggtgtgagttggtatctcattgtggttttgatttgcatttctctaatgaacagtgatgttgagctttttttcatatgattgttggccacatgtaygtcttcttttgaaaagtgtctgtcatgtcctttgcccactttttaatggagttgttggtatttctcttataaatgtgtttaagttccttgtagactctggatattagacctttgtccaatggatagattgcaaaaattttctcccattctctagattgtctgttcactctgaggataatttcttttgctgtgcagaagcccttcagtttaattagatcccatttgtcaatttttgcttttgtttcagttgctttaggtgtcttcctcatgaaatcatttcccatgcctatgtcctgaatggtattgcctagattttcttctagagtttttatagttttgggttttacatttaaatttttaatccatcttgagttgatttttgtatatggtgtaaggaaggggtccagtttcaattttctgcctatggctaaccagttcttccagcagcatttattaaatagggaatcctttccccattgcctgtttttgccaggtttgttgaagatcagatggttgtaggagtgcagtcttacctctgcattctctattttgttccatcggtctatgtgtcttttcttgtaccagtaccatgctattttggttactgtagctttatactataatttgaagtccagtaacatgatgcctccagctttgttctttttgcttaggattgtcttgactgttcaaactcttttgtcgttccatatgaattttcaaataggtttttctaattctgtgaagaatgtcaatggtagtttaatgagaatagcatcaaatctaaaaattgctttgggcagtgtggccattttcacaatattgattcttcctatccataagcatggaatgtttttctatttgtttgtatcatctctgatttctttgagtagtggcttgtagttctccttgtagagatctttcacttcactagttagcaatattcctagatattgtattctttttgtggcagttgtgaatgggagttcattcatgatttggctctcaacttgcctgttgctggcgtataggaatgctagtgatttttgcacattgattttgtatcctgagactgctgaagttgtatatcagctggagaaacttttgagctgagacagtggggttttctagatatagaatcatgtcatcttcaaacaaagctagcttgacttcctctcttcctatttgagtatctttatttctttctcttgcctaattgccctggccagaacttccaataccacattgaataggagaggtgagagagggtatccttgtcttgtgccagttatcaaggggaatgcttccagcttttgcccattcagtatcatattgatactttgccatcttttcaaccttcttatttcctagatatgtgcccacttatatgctgcatataattctgcttacctggaaccatttaagtatgcatgtacttgggtatataagagtaaatatgtgtatataaacctgtaggcagcacagtcagaactgtgtttacatatgcacatacacacatgaattaaggataaaagatatagaaaagatgagggaaacaactatcctgagcattgctagatatttccaaaataattacgtattaaaattgaattatcattgcagagccaaaacacagcagggggcagagttcagaaatgttcctctaggtcagctgtgccagttctgtaatctgtgagcaaattactcaaaatatagcagggacataattaaatatttcaacactattgtcaacagaatatattaagcacttaactccttaaaaagacaataattgtaatagtggaatccactttatactagtcatactcaattcagcttttaaatgttatctatttaaaatggacagttattacttacaatatatatgtaagtataaatatatttaatatgtatgtaaatatatgtgctatatatacatttataatgaaagtatacatatgatataccttttaaaatcaatacatacttaaatattaagttagctctccctccttcactaatactagtcattctagcatgccttatatctactcaatttcttttcaatttcaacatgaatttaaaagttattgcttaaatctaaggaatttaatatacacaacagaactttataaatgtattcaaagaaagggtctctagatcaatgcaaatttttttctttagatcattactaaaaacgcatagtcagggtcaaaatagagctggaattctttttacctayatttaaaaagtatgcagtgaaaagtattcaggctcaactagataaagaagctttacagagtgctttatcagcttcaataattaaaagatttcctgctaactattcaataagagtcttctttatagctctgctttgcagtcagttctttccatcacttcctttgaaaagtctaattaaagtggaaggctttatttctattcattccgtgtttgccatattggacatagatactaaaataactaattaaagactatattggctctttttaaattcttgtcctgttggaactttatggggtatgggagtggaaggagaagtattttctcagttttagtttttaaagttggttttttattgtcactctctcaatattaattatcttttgggttaatggaagtaatatggataactttctccctgatgcctgtattgatgctgtaataggtgttttttttttagagtaactgactagtgaagaattgaaactaaacacttcagagcccttatattccccttgttgtattactggagcattacttaagcactgctaactatcttttaaaaatatatttgctgtagtgttcaaagaaacttgcatggaaaaaaagccattttctacttcccagaaacagatgttttcttttttgtgtgtattttcgtctatatttataaccatacgtttaagatcataataattatatgctgtatatggcttacaaggtttttcttttccttattctaattataaactctagccagtaagtgtctccataaaggtgatacgccttttatagaatcaagtgctaagataaagaatcttaaaagcttattttttactgttagaatataggcagttgaagggttaaaacaagtcaaccataattcaatgagaacattctggcccttactacttactatcttgagagagttataatagagtaagaaacatatttatgcaagtgagtgtaatacaggaaagaatatgatgttgttaagatgtagtacaaagtgggctgggtgcggtgacttacgcctgtaatcccagcactttgggaggccgaggcaggcggatcacgaggtcaggagatcgagaccatcctggctaacacagtgaaacctggtctctactaaaaatacaaaaaaaagtagtacaaagtattttagaggcacagtgctttgtagttgatcaatgaaatacttacagaagatttcaaaataagatacatatggatgtgtacttgtatatatacccctatatgcatttccaggaaaatggaatcataaagatttggatacaaaaaaattattttcatttatgtttggacatgaggaaggaagagacatactctagaattctatcagaagattgacattgcttgagcaactgctcagtcatacctctgagaatagtcattttaaataaaatgacaacttttaagaaatactccatattcaggcaaagttccaatgacgtaatggtcagaaatcttaagttgatgcattttagaaaaagccaaggataccttctttgaagatatagtttgctttaattttattttaagttccatgaaggtaggaattttttcttttttgtttgatgattcatccaaagcacctaaaacaatagcttttacacagtagctactcagtaaatacttattgaacaaatgttgaatgaaactcttggcacatattttggtttcaatccattcctgatggccagacaactgggcagaatcatggactgaattctttaaaaaaaaaatccgtaggaatcaatgcagtacagaggataaaacacaaaactgaaagtcaagacatttgagttccactgataataactagttgtaagatgatggtcaaatcatttaatcttccatccaagaacattctttctcttctcaaattctatgagtcaattttcagccccacttataactcttaaaatttcatagaaggttatccaagcttttcatgcatcaaattgtccttgtgataaagataaatcatagctgatgatggatgattaaataaggaaatataaaaattctttgaaagcttttggatgataatatttatatattatacgaaatataaatgttatatatattaagtatatctatgtgaagaaaatgtgacaattccattcagttatgtaataacattttaactttgataatatattacaaatatttcagattaacataaacacttaaaagagaaaaaacacttaagatttattttcttccctatagatctagctatctatatatattaagttgaatctaactcaattttacaagtttgacaagataaacagaagaatctgatacaaacttatgtagattaagcaactgcaaatttgtgaaaagttattttttctaatcttgggttagaataaaaccagaagacaatggtagattttatttcaatccaagggacttttttttttaaggagaaaactgctaaatgctccaaaggctcatctttttatagataaagtgattttttttcttgcccacatcatagcttttatggtattttggattttcattttcaattcacagaagggctacttccgctcacaaggcagtgttacacattttcaaacaatgaaaaattacaaggcatcaatcagatccatagggaaattgagtttctatgatgaaatctatagttttactacacacttaataaatacttaatactaatgatgatctcatacccactcatcactggacctaaatgtttgctgcaatatcctccacatgattccaatagtctgagcaagactcacaaaagccaggtcactaagcaaatacacagtgcagtatggcatgggcagttagttccagcagatagaacaagcatcttttcctggacatttcctgtgcagtctgattgactccctgatgtttcccattcactccaagctgctttttccctcctccattcaaaattgcagaattctctccctggtctcaagctgctgtctctattcttaaactatatgctcaacttcctaccaccccaccttattttttgatgaagtctgtttcatcatagaatccttaaataacaaatctcatagaaaagagtctactctgctcctgtgtataacattagattttaatgatatgaaagaacaaagtccaatagttggtttggagagtgagagcccccaaaaaaaatgactacaagaagagaacaaatgagtacatattaagaaatttccattgcaggccattcattcctgatagttgtagctctctatctcattttaaatgataggcagcctcaatcaacttttgatgcaatattaaaaagaataggaaacaatgattatgtagcaaccaaggtcttagatggtccagaaaccttatattaatctcttcccctaccaaaatttgaggccaaacatgctaaagcatgtagagtttgctcatttaattttacctcctttcattttctcttttcattctttgaataaaatgacaatatttcacgaaacagtcaggaagtaaatacagaataatagaaaagaaaatggtcacagacacctgctgggcattttctatacaccaggtactgtactgagaattttgcacatattggaatgatgcatctgtatgcttcacaaactgatatcattaaatggaccctgcttgcaagaagcaaactccaaacaccttctttcaggttattggttagtcatataagaatcagcaaacatgaactttcttttttccatcaagtcaaaagggcaaaaggaggaaagtttaatcactacatagtaatctcataaaatgtagagttctgcgtaaacataagtcwcctaaaaaatctctatgatgggactaatagataccttcaatgggtttataaacctccagtgctttgtgttacagagcatagcaagaacaacatattcgttgttgttgttgttgctgctgctgctgttttctcctcccagtgaacagtttggctgtgcaatttataggatgaacacaagatatgtttgcatcctgagatttgccagtaaaacattctcaagtcctttattaatccccatttttaaaaattcagatcattctaattatactccatcactcaacgaagttttacaggaaatcaaagaatttgttttcaatgactgaggacaattaaacttggttgagtctgaaactttgtgatgtgtatttcaaaggtctttctcaataaatttttaggttgtggtgtatttatcagcctaacaaaaggattaatatagctcctaaaaagggataaaatattaaatagtcaaaaagggatcgaatattaaaaaatgtaagttaggtaatggatggatcaaagtgtcaataaaattgaagacattcttagcaacttaaatactttgaattgggtggttagaatttgttcaccaggctaactatgtgtgcaggaagaatttttatatttcaggaatgtctaggttaacaaaagctaaatattcagatgtaataaaggaaatagtttttagtcctggtgtctaaagtgaaaaagcattaattcaaatcccaactccaccactgatgagctgttgatcttatcaaaccttttaggcctcagcttctttttctgtcaaattgttataataatggtatctactctctgtgattggtgtgagtattggaaataatgtatataagatacttagcatagtgtctgtcaagtcataaaaatgcaataaaagttagttgctgttgtaactgtatacttttagcatgtttgtctttaaaagacctataatttatttatttaattgctaaaatttgtctccatttttcttgttcagagattgttttatttaatcttcataataacaggattaagtgagaagagtaaattctctaatttctaattctatagttgaagaaacttgaaatcaagaaaaagaggagaaaataatttcttttttctttttttttttttttttgagacggaatcttgctctgccgcccaggctggagtgcaatggcatgatctcagctcactgcaacctccacttcccaggttcaagctattctcctttctcagtctcccaagcagctgggattacaggcatccaccaccacgccgggctaatattttgtatttttagtagagatggggtttcaccatgttggccaggctggtttcaaactcctgaaagtgatctacctgcctcagcctaccaaagtgctaggattacaggcatgagccaccacgcccggccaataagttgttaatattatactaagtactakttatttatttactatatactttataccttatcacatttaaccccaccccaaggttatatgctagttattactcatgaattacagatgagagaatcaaggaaattattcagaatcatatcactagtgagttacggaccaggaactttaacacaaatttctaaactcagaaacatattctatgttatttctaataaatatggccttatcactaatcaacacatcagtgtcacttcaaacacatttctagaatcaagttcatactcttcacaccttctaatctttgtgtccccccaaaaaagaaactatctcctagattcttcatctatattaatggttttacaatccacccaatcactcaaactgaaaactgccagttggccttggcctcccactttctcaccacccatatttatggatcacttcctgagagttctctctggacggacttgcagctctgtctcctgctctccatctccactgttataacctaaggtactcatcatctctgcctcatattttatcatacactagttccttattctggagaattgaatacctttacaaacaaagcagccatacctatctttctaatgcatagatctatttgtttcccctactaaaaagttttcaatgtctcttcattgccttcagagaaaattctaaacttcttccaaacagatactgaaaaccatgtaaccaccccaggttatcccactccaacttctctgtgttctgggtacagtggtaagtggtgtttcttaaacatatttacatctacttactgtttttatgattttctctttgtctgatatgactttcatcaattggatagggtaagcttcaacacattattcaaagaccaagccatcctccacttagcccctaccagaatgaatcatgtgtttttccatagtgttttataccygttgctgatagaacttcattcatcctatgctattacggtcagtcattaccatgtgagtaactcttgagcaggggccatcatttaagaatattagtattaccaaaatatcacatgggaaatacttaataatttttgagaaataaatgaataaattacatattaaatacataaatggtgaaaccaagaattatattgcaaatattaaacagctgcattttacagacacaggcaaatcagaatgaaagcacagatcaataaaaatgggcccagaccaggagattagggtatggaccaatcagaattgatgttagctacacacaaccagcttggactgaccatagtgaccatatacttgcaccaggtgcagctcatgtcacttaattctatgcaatataattttttcaatggcttttatgaacttttaattctatttaagataatttttcaatggcttttatgaacttactatttcccccaggggatataaagataccatcaatatgtataatttgagtaaattcagtagtttgactaatggatcgatgtaatagcaaataatttattacctgccctctgtgcatcaatctcactttgaggtaaccaagccttcttagttgagtaagacataaaccctgtcttctgggaatcatatattacagaatcttctcgatttttattctattatttagtaaaataacaaactggtaaccaattaaagrcagactacattcttcacaatatctgatttgatttgtttctttaaagggagagtccattctaacgaacatactatcaccacttccaaggctctctgtcaacatacaaacattctttccattagaatgatcctccttgacragggtggtttcaggcaataaaatgagttactgttgaaatgtgaatgatgaagacattaaacatatttaaaagacacgaaatgagtcctacagaagtttggctaccatccagattcactttttcctcaaacttctgtaatattcaaaaaggacaaatactcctgattttaaacccaccatgctatttccagggagccatgactgctaggtaaaatgttcaagcgcatgcgggattgtcatcttcctgaggtggagtagagacaatccttgcaatgggaaggaagatagactaggcagccaacctcctttacagagctaaggtcataatttcatggcctataattttatgttgcatcgtatcttcataggtagttacttattatgcttttaacttaaatatgtgtcacacatattcttttgtaggtatgtaatattttattaattttttaaaaaatatgcagctaactcgtggaatatactattaggaagtcataaaaacattaccaaattacatgtaatttctcttctctatgtccttcattgggttacctgttgatcctttaatcaaagccttgtaattacgaaaagagacgctacatgagtgcccatatgaaggtgattaaagggagaaaataagagaccgagagaggaatgagtggggagagaagaggagggacagttgatggtgtcscctactagttgtccagtaggggagagagaggtcctcactgcaccatgttccagagcttatttttgttgttgttgttttgagacaaagtstcactctgtcgcccaagctggagtgcagcggcatgatctcagctcactgcaacctccacctcctgggttcaagggattctcctgcctcagcctcccgagtagctgggattataggtgtgcaccaccatgcccagctaatttttgtattttttttagtagagatgagttttatttttaattttattattattatactttaagttttagggtacatgtgcacaatgtgcaggtttgttacatatgtatacatgtgccatgttggtgtgctgcacccattaactcatcatttacattaggtatatctcctaatgctatcactcacccctccccccaccaaacaacagtccctggtgtgtgatgttccccttcctgtgtccatgtgttctcattgttcaattcccacctgtgagtgagaacatgcggtgtttggttttctgtccttgcgatagtttgctgagaatgatggtttccagtttcatccatgtcccttcaaagaacatgaactcatcattttttatggctgcatagtattccatggtgtatatgtgccacattttcttaatccagtccatccttgttggacatttgggttggttccaagtctttgctattgtgaacagtgccgcaataaacatacatgtgcatgtgtctttatagcagcatgatttataatcctttgggtatatacccagtaatgggatggctgggtcaaatggtatttctagttctagatccctgaggaatcgccacactgacttccacaatggttgaactagttgacagtcccaccaacagtgtaaaagtgttcctatttctccacatcctctccagcacctttgttccctgactttttaatgatcaccattctaactggtgtgagatggtatctcattgtggttttgatttgcatttctctgatggccagtgatgatgagcattttttcatgtgtcttttgactgcataaatgtcttcttttgagaagtgtctgttcatgtccttcgcccacttgttgatggggttgtttgtttttttcttgtaaatttgtttgagttcattgtagattctggatattagccctttgtcagatgattaggttgcaaaaattttctcccattctgtaggttgcctgttcactctgatggtagtttcttttgctgtgcagaagctcttyagtttaattagatcccatttgtcaatctttggctttggttgccattgcttttggtgttttagatatgaagtccttgcccatgcctatgtcctgaatggtattgcctaggttttcttctagggtttttatggttttaggtctaacatgtaagtctttaatccaacctgaattaatttttgtataaggtgtaaggaagggatacagttttaactttctacatatggctagccagttttcccagcaccatttattaaatagggcatccttcccccattggttgtttttgtcaggtttgtcaaagatcagatagttgtagatatgcggcattatttctgagggctctgttctgttccattggtctatatctctgttttggtaccagtaccatgctgttttggttactgtagccttgtagtatagtttgaagtcaggtagcatgatgcctccagctttgttcttttggcttaggattgacttggcaatgcaggctcttttttggttccatgtgaaccttaaagtagttttttccaattctgtgtagaaagtcattggtagcttgatggggatagcattgaatctataaattaccttgggcagtatggccattttcacgatattgattcttcctacccatgagcatggaatgttcttccatttgtttgtatcctcttttatctcattgagcagtggtttgtagttctccttgaagaggtccttcacatctcttgtaagttgaattcctaggtattttattctctttgaagcaattgtgaatgggagttcactcatgatttggctctctgtttgtctgttattggtgtataagaatgcttgtgatttttgtacattgattttgtatcctgagactttgctgaaattgcttatcagcttaaggagattttgggctgagacgatggggttctctagatatacaatcatgtcatctgcaaacagggacaatttgacttcctcttttcctaagtgaataccccttatttccttctcctgcctgattgccctggccagaacttccaacactatgttgaataggagtggcgagagagggcatccctgacttgtgccagttttcaaaggtaacgcttccagtttttgcccattcagtatgatattggctgtgggtttgtcatagatagctcttattattttgagatacgtcccatcaatacctaatttattgagagtttttagcatgaagggttgttgaattttgtcaaaggccttttctgcatctattaagataatcatgtggtttttgtttttggttctgtttatatgctggattacatttattgatttgcgtatgttgaaccagccttgcatcccagggatgaagcccacttgatcatggtggataagctttttgatgtgctgctggattcggtttgccagtattttattgaggatttttgcatcaatgttcatcgaggatattggtctaaaattctcttttttggttgtgtctctgccaggctttggtatcaggatgatgctggcctcataaaatgagttacggaggattccctctttttctattgattggaatagtttcagaaggagtggtaccagttcctccttgtacttctggtagaattcggctgtgaatccatctggtcctggactttttttggttggaaagctattgattattgcctcgatttcagatcctgttactggtctattcagagattcaacttcttcctggtttagtcttgggagagtgtatgtgttgaggaatttatccatttcttctagattttctagtttattcacatagaggtgtttgtagtattctctgatggtagtttgtatttctggggatcggtgatgatatcccctttatcattttttattgcatctatttgattcttctctcttttcttctttattagtcttgctagcagtctatcaattttgttgatcctttcaaaaaaccagcttctggattcattaattttttgaagggttttttgtgtctctatgtccttcagttctgctctgatcttagttatttcttgccttctgctagcttttgaatgtgttttctcttgcttttctagttcttttaattgtgatgttagggtgtcaattttrgatctttcctgctttctcttgtgggcatttagtgctataaatttccctctacacactgctttaaatgtgtcccagagattctggtatgtggtgtctttgttctcgttggtttccaagaacatctttatttctgccttcgtttcattatgtacccagtagtcattcagaagcaggttgttcagtttccatgtacttgagcaattttgagtgagtttcttaatcctgagttctagtttgattgctctgtggtctgagagacagtttgttataatttctgttcttttatatttgctgaggagtgctttacttccaactatgtggtcaattttggaataggtgtggtgtggtgctgaaaaaaatgtatattctgttgatttggggtggagagttctgtagatgtctattaggtctgcttggtgcagagctgagttcaattcctkggtatccttgttaactttctgtcttgtttttctgtctaatgttgacagtggggtgttaaagtctcccattattattgtgttggagtctaagtctctttgtaggtcactaaggacttgctttatgaatctgggtgctcgtgtattgggtgcatatatatttaggataggtagctcttcttgttgaattgatccctttaccattatgtaatggccttctttgtctcttttgatctttgttggtttaaagtctgttttatcagagactaggattgcaacccctgcctttttttgttttccatttgcttggtagatcttcctccatccttttattttgagcctatgtgtgtctctgcatgtgagatgggtttgctgaatacaacacactgatgggtattgactctttttccagtttgccagtctgtgtcttttaattggagcatttagcccatttacattcaaagttaatatcattatgtgtgaatttgatcctaacattatgatgtcagctggttattttgctcgttagttgatgcagtttcttccaggcctgagatgaggtttaactatgttggtcaggctgatcttgaactcctgacctcatgatccgcccaccttggcctcccaaagtgctgggattattcatgtgagccaccatgcccggcccgttccagagtttttaataagaatatctgggagctaaagaagagtgcatttagtcagcaagccacttatggatccgctgaataaaatatcaagttctagtaaatttcaatctacagacaggagatccaggatgagacaagactgaaaaacctctaaattcagattacagtttagaaaagaaataaaatctctggatttccaggtattactggaataacaccacctctatactccaacagtgtcgtatgtcttcttcaatactatttctgctacctgtgacactctttcttcctcccctcccctttcttgctaactctgctaataccacttcctcagataatacagataatcattttctttttttttttgagatggagtctcactttgttgcacaggctggagtgcagtggcacgatcttggctcactgcaatctccacctcctaggttcaagcgattctcctccctcagcctcccgagtagctaggattacaggtgcccaccaccacacccagctaatttttatatttttagtagagatggagtttataggcatgagccaccatgcccggcacagagaatcattttctgaaacaccaaagctaagttaggagcttcttttgtacttactgcrtaacactctgcactttgatttatggcacccaatgcatgtataattaaatggttcagcttcagcatctatctctgaaattgtggacatgcaatttccaggacagcagagagactgtgctttcttttcatccctgtgtctctagggcctaatacagagcctggcacattaggcaatactcaataaatatattaagtatatgaatgatgaatgagtgaatgaatgaatgcatgaatacataaataagttgcctctggaccatccaagcagatatatttagtagaccactggaattatcattctgagtgcgaaagagagattagggatggcaataaagattgaagagtcatcaggttacaagtggtagtgaaattcataggagagaataaatctcttaggaagagtaaaattgcagaagactgaagacaaacaagggatgtagatctcatggaaacaattcagaaaacttcctcagaaaatatgagtgcagcctagatagtagttaagaactcagattgttttagtcacactgacttttaatcccatctccaggtcatatggtgtgaactaggtaagtgtggagctcagctgtgctggagacagctaagctgccaggtctcagagcagctgattaaaacaacaagccaaaaaataaaagcgacaatcaagcctttaatctcttcctgcagtagtrtaatcaacagrctgaactggagagccaagagagcattggctccccccaatcccattgcacttgcccatggaagatcacattggtcaagatgaggtagatcagcacagatattggggtcatcttattgctgagggagccccaaacaaaaggcttaagcagggcagggggttgacaagaaaacaacggaaaagagccaggagtggaaaagtactgagtactgagtcagagtagggacaaatgtcaagtttttccctttcttccctgtaaggtggtttcagcagaggcacctgaaggtggcccctgccaaaggctccaaacaaagagagctctgaatgatggcactgggggtaggaatgcaaatatgcataaactatggtctgccagggaggcctgaggccttgactgcaactccctttagaaactgtgccgcgctggctgcacaccaagcccggcgtggggagggcagtttccccgtgacacctgctgggcaaagctttcgtcactgactatagttggccctgaaaatcactcacaggtttttggccaggaagcagactgctcagtaagttacttgaactctctaaatctcaatgtcctgatctatgcctacctcgtgatttgtaaaaaaactttgctaaattcttggcatatatgcagtgctccataaatgagaacccacaggagcaggttgaggcgcaggggcaccactgagactaagagaacagaggccaagaaggtcatgactgaaaatcatctgttgcagtcgacaactgagttgttagtgaccttgggagagtagattcagtggagcaaagacaatgaaaattagagcgcaataggttatcagcaaatggaaggcaagggagagcggacaggaatcatccactagtctatgaagatgttggtgacaatgagaacgtgtgtgcagctgatgaagatacatgagactgtacagctgtcatctgatttgtaaggaatttgtcccctgaatgcccttaaaccacaataaaatcattagtatggttttaaaagctaactgagtacattgttttagagaagatggagactacagcaaggcagggaagagaaaaagccccaggacctggggtgaagccttctaagcagagtcagtgacagctgagtcacgcagaggactctgatgtcaccacagagcttgtggtatgcagactcattccagatgggcaggctttccttcaggatccctcacttatctcttctcctctctaaaagactagacactttccaccactactagccctctttctgtacatctgtcagcttttatccccagaaagcctgggccttgacagtcctcatccctgttgctctctgtttctgtaagccaagttttgcttctgttcagcagactgagaaacatcacagacccgtcttcgcacagaatccagcaaggataggatctcttctcctgactcaaccagaaataaatttacataatttattacacattaatatttttgaaactaaggacagaccgtggttcctctgtaaagactgaagcatcaagaaaaatcagcagctattctaaagaggcaaaaacataaaacccccatcagaatcccattacagtactgagaccataggagaaagctaacatgcatatcatagattttccatggaggatgtgaatccatagcatagtgaggcctatgtaagaggatttattatactttttatgtgacaataatatttccagggctttcaggtacacctagtacaaaggcttttcctagtactaaaatgccacaagagacacatgaagctcagtaactctttaagttgtagcttaaatcacccagatttttgcatttgaaagaaagcatagaatgcatgcacaatcaatgtaaagtattacataaaataatttaatcatatacaactcagcaggtttatgcctgctgccatttctctcctgtttctttagtagactatcattttctgcctctgctgtttacaggaatatattttatttcaaaagcaagattyttcttggcactcaactcatccatgactttattgttgaattttttttaatgttataactcaactctttgtgtggttaaaatggctgaggctcttttatgttgttcttatgttttcttcccccatcaagcattctgaccgctgctgtcaaaatctgataataaatgaagatttctcccacagtggacctcttataaccatggcaactccatcagcagctaatggtcacattacaaaaatgcttttgaaaaaggcagcttctcacattgctttagtacaaatgtcctttccttaccttctctccataataattctaagaaaacaacacatcccaagcaaacatttgctttgttgtgcatatgtggggtcactttaaaaaataaaaaaaaaaaagaagagaaactacaaataataaaagagaaagattatttgaaagcatggcactaaagtaggaaatgatactgatggcttagcagcattaacaacatatttgtattgtttttacaactgaagtcaatgcagctattgcttcttaagaatttgataatttttattgctgttacttcaccctaccatcaaattagggaggctttctaaaatgcttattttaggtttcatatgaattgtctctgagcaattggtcacttgtgggaaatgcagctatatgtacacactgatatatcttcttttctgtctgagactttcatgtgcttttatatatccttgaaaaaaccccataggagaattagcatatggacttttcagcctgcctcacacaggttcacaacagaaattcctgtctgagctctgctcttagacactcaaaagtgctctggcttccttatttacaaagtagatcaaaactagtttctaacatagaaattttcyccaagtgcctgcttctgaaatggcctgcctgttaaaacaaaggaggatgttttccacattaacttcttgttaaaatgatgtatctgtctgaatggaaataataggcattcagatagagttctctatctccatccatatgtcactctgtctgtctacctacctacctgtctataaatacctacccaaggaaagagacttcctcaaatcccaaacatttcagtgcttgagttttgttttgttttgttttcccccaatttgctttcaaatatcaatcgtgatcaaaaagtaaccacagattagaactcagtgtcagatttccaaatctgcaggatctgttgatgctaatgacactaatattaggtacatttcataaatgtaaataattctctccctctaaggttttcagaactaaatggtctatgtaggacagacctaagagtaggaatgccccaggccacagagcaagcagcaaagctattttattaaccttaattacaatttgatttttaccttgcccaaaacctkcttttttaaaactcttcttaaatgtatcctttctctataaaggtcctttaatcatggtggataggctttatagttaagacctccttagatttgcattgaaactctgcttctttctgctggtaaactgggcaagttactcaaactcacttaatgtcaaagcatttatttgtaaaaccagaatgataaaagttctccctcagaggatagctgagaacaatagttggcttaatacatatgaaaacacccagctctgtaattagaagaaactaaattctccaggaatattttccccccattttttcttccccatcattcctaattctcactctctccttttccttagaataagtagtcatgagattaggctcatctttctgatttgctcatccattttataagtcatttttataagagcgtaaaattatttgcaatctggtaagataaaacaagttgaactgttgactgcaagattgtcagtagtgaatgtttggtttcccttattgaaatcaaaagttacaaaatttcataacatacataaaatcaccaccacaaaaatccatctttcccaacataaaattaaattaaaaataaaatgagtgtctgttagcatatcaaaaaatgatgtttcccttttgaactagttcaccaagttcatgcagaagaatgaacttggagaattctatcaccgacagcccagacaacagactgtggcctgatattacttatcttagtggtgggagtgtatgaggttggtaggaaaacaacagcaacaaataaaaatgccaggatggtctacagaaaaagtttatttaaaattttttaaggcaaattttagagaaagtttcaaaagggaacattgcacgccattaatttttgccctggcacacaaactttcatcctttagaaggaaccagaataaatttgaagcttttaataaaatatttcatggggtaacaaaagcaacattaaacattaataaataagtctttgctgcaaattcattttgaagtgtagtcatccaagtgcaatatgcattgtgtaaatgtaacttttggaaatattaatactaataaagtctgagttcatgaaatgttcttgcctgtcatcttgagaccaagatgcatcgtcaaattgcaagcaaacattgtgaaatcaaaacccagggctgttggctcagtgagatgctgaatgagaaattgttaagtaaaaaagaccaaagggagaaaaaatgttgttctataactaaacaaatggaatcagtaaaaagtcattatttctctaagtacacatttgactacacaaaggagccactgtgttcatccaatgtgtcccagtggtcataggccttggttattcaaaaaggactttttcttttttgtcattacccctaccttctgtactgtatacaacctaaagaaagttttatgtatacaaccaacaattcattttccacatgtaattttatttttttctttcaaaggccaaatcttccattggaataaaaaaaaatcaccaactctttaagttctttcattttctatctaagcctccatattatatagaaaaactgatattgcctctttaagaagtgtaattttacctacattgatcaatgtaactctggttctttacaaaaatgatggaaatgttcccagctcaaattataatttcaggcattaaatgataggttcccttagaaaatgtgagcacgttttctttagggcaatgttgacattggctagtcaataaaataatgttttcttctgtattaactcatttagtggaaacaagttcagggttggccagcctacatgaccaccttagtgaaatcctgaaatgtgttattgttttctcaggtaagtattgagaagcaggaaatttttctttttctgttttgttattgttgatgttgttattgctgttcttcatgatgacatcaactgacatatgcctagcattctgtgtactatgcagggaaactaattcagtgtactatggagagaactaactcagaaaagaatgagaaagaggatactgggaaagaggaaaggaggaaaagtcactttgtaatttagtataatctaagtaccaagactgtatttctgttcaaaacgaacaacaaaaaaggtgaaaggcattgtctgtctactggaaaattctaagtttattaaacacaaaaattcccttcctaagagatttctgagattccctattttggccaaagttatacatgatgatgatgattagcacacaaagataataaataatgaagaaatcagtgaatatgacttaatagaaatgtccttatattttaagacccactatagcacttactctgctgctaggcactcctctaagcatcctacaaattttaattcatatcatacttgtaacaaccccaggagatgcattctattattatccaatcttacaagacaagaaattggaccaaatagaagttgtttgtccaaagctacatagctaacaataatatagtcaaactttaaatcaagcattctggcttctgagactatgccttaatacccattaaccatgctgcctcaatgtgctatttagcagaaggtaagcctgcttacattgtcaggttgatgtacctatattcggctcttttaagttgtattggtagtcactcaatatttcagatagtctattggggcttctaaaataataatggtttgctattcattaataattactaataataagtcaattattattttagaagcgatagtgatccattattattttagaaggaatatttgattttttttagtagtttaggatattggcattaaatctaagagaaaagcctgaagtaaaggcatggctccaatttttttttgtatttatggtaatcctacaggttgttaccttacagacttgctcaaaaaaaaaaaaaaaaaaatccatcaatgagcccaaaacctgaggttgtggatgacctttgatttaagggacttgaaagggtctccagatcaccatcattgaggtaacacgttgagctttggagacagacaaatttgaggtttcattctcaccttaccatgtactatctttgtatccttaggcacattcttaatctctcagcagctaatgatttttagttgtaaaatggaactaataatgtagtttcttggagttgcttggagaatttacatatgatgccatagtaaaagctcaaagagtgttagttcctttcctttttattgacaatatcatgactataattatattttcaagtaaaatgggtatttcacaacacgttatctctgtctgcaaatttctgcaaataactttaagatatcaaagatttcgtgaaattgaacatctttgagagagagaaagaggataaagtagattgtcatgatcctaccttctacacctcaaatctccaccactagatttgacttaaacaaaatacagaggacattatcactagaaggctacattttaaatgtttgggtttcagctaggcatcattactcacacctgtagttccagcatttggggaggatgagacaggagggtcacttgaggcaaggagttccagacaagcatagacaacatagcaagaccctgtctctataaaaaattaaaaaataaaataaaatgagtgtctgttagcatttcaaacattaattaaatatttcagattatttaggtcagtaaatagtacatttccccctgcaaagacacttgtttcccacattgaccctcatatcgaaagattccatctctcaagaaaattgagtttatgtagtaatacttaatttaactcccattttcattgaaatcmtatatacagatatagtcaagtttcttatcagcatgaaaccactagtgtgctcacacctaattgataaaattccaacccaaagcaaagaaacttaacatattcactcatctttattgtcttattgcaagctaattgttgtagactgtaaaactattcatcaataattagttcatatccatgatggaagattatatttcccagtcctgttaaattcaggtgtggccatatgacttgctttggccaagatatgaacggattggaatatgttaattccaggtgaaagttttcagagtagtccagagctgagacctgaaggattaataaatattagccaggtaaagagaagagaaaagctattctagacagaggaaatagcatgtgttaaacctggaagagattggcaaacccaagcctttaggttagtgtaattagagagactcctggactgcagtagtaggaaagaggtaagatggtacaaatttgttcgtcatatcaaggactttatattttttagcaagtgcagtakgaatccatataagggttatragcatggaagtgacatgatccgatttagttttgtaaggagagctcagggttttgtacacagaacaaattggagacagagatagtggaatctgttaaccacataaaagactaacatgattatccaggctggaactgatagtggcttgacccagagcaatggctgtggaggcgcaacaagagggtagattttaaatataactaggggaagacttaataaatgcctaatagacttaatgatagatagaatgtagaaatagaataatagggagtcagaaggatgactttggggctctaaattaagtgactaggtggaaggagactccatttatggtgacaaggaaaacttgcagatgtgcacacttggagaaggagagcaaatatatttaacctgagaacataatatggagatcccactgagcaggtgatgcttagagaagtaatctggacaggtaacagattattagattattagaaagattattataatatgattattatgatggaattatttagaaagagagtagaaaaggagaagagaatataaaagcccctgctatccaggtctgagtaactctaacattcaactggagagaggaagaggaatgtgataggaagactgagaaaaacagagttttartaaatcgactcccactggaaagcacttaattgattcttcagcttgaagatataggatgggtatattttcctaaaagagagcagccatcagtagattctgaatctgggtcagtcaggagctactgactgacctcaggggatgatagaagagggaaggggcacagcttctttgctaagcgttggtgaaacttcagcttcttcacagttttatttaaggccaaaccatttctttattttctacggtgtttcctcaaaaaaagacactattgtcactctgtatgtttgcatttaacacactagtatgtttaaactgtgtttatagtcttctagaagctgtataaacaatttgggtcccgccacaaactaggtacartttcttcaactatagcctagtggtacaagaagccatttccatgtaaaaatcattgtttttgcaccccctcatcatgccacatagattcaggtgctttcaccttcctcaaactgcagggcccatgttacttatagctgcaaattggcccactggatataaaaattcctaaaggggagaaaaaacatgggattatcccatttttaaagggataactatttagacatattgtccttggtctaatcactcacctgtccctgacttgatattaggtactttaagggactcctaatttgaaggaaaagttgccactatccaaaaaatgatgccgtttctctcaccccacccggctaaggtgagagcacctggtaaccaacttcyttcagtacatttatcctccagagaaatttgcctaataaattccaagagcttaacaaatactagttttctcattttctgcctaatgcaagcttagaactcagcttccggttgacctgattactttcctgaattctaggccctttatcaatgctaacaataaaggccagtctcatatctactgttttatttaatagtcacaataaccctataaaattcatcttcataaaaatgccaccctgcctcttgttcaggcaggaattttcttgaaagacaaattttaagttacccttgattgaggctttagaaacaatagtcatgcatgacataatgacatttcagtcaacaaaggaccatatagaagacggtggtcccatgagattataatgctgtatttttactgaaccttttctatgtttggatatatttagatacacaaataattgcctagagtattcaggatagtaacatgctgtacaagtgtgtagcctaggagcaataggctacactgtatagcctatgtgtgtagtagtctataccatctaggtttgtgttaagtttactctctaatgttcacacaatgacaaaattgcctagtgatgcatttctcagaacatatctccgccaagcaacccatgactgtatttcagagctcatggcagcaacctcacgttccaataagctacgcagaaccctgggtagtttttgggaactgacttacccatcttctacaatccggttagacttagctctctaatccatctagaccagctattttctttggtcatttctattgtctcaatcacttacgttaaagaaagtcttttagagatgttaatcaggaagtgctaaccaggctgctggagttgctgtagcgccagcctcagatcttttgagacataaagtgtatagatacatatgtgcgttacttacgttcctgtcagtcaactggttgtctcatcatcttcagaaccataagacataacctaaaatgatgcttgaacttacttcttaaaatctaaaaccacatttctcacatagtcatcacacatatatttctaataggatagtacaatacagtgataattcacctctctgtatagtctacttgggggggcaaggatatttaaatttcaatggcctgaattccagtcttggttctactatttttttttttttagtgatcttaacttttttgagcttcagttcattttttcctcttctgtcctacttacctgcaaggagtattatggagctgaattaagataatacatttgaaagcaataaagagtatttttcatatctggttgataataatttaatgactacatagtttcaacaaaatacttctatatattaaggctggtttcagttcctgtctcaatctcattttgcccacaaagaagagaataatcaagattagtggttcccataactaactgatttcacctgagaaactatatatatatatatatatatattctcagactctacttaccaaggttttgactcaatggaccaagatacagacccaggagcctgtattttttaaatgctcctcatgtaaattgctacagctttttggaggaagatggcaatgagtgttaacatttaaaatatacttaccctttaacctgataattttacttcctgccagcatacttcaacaagggcagaaagatatacatgcaaatatgtttatcatagctttgtttatactaaaaagacaactttttatcaacaggagactaaataaatgatggcacatttatacagtggaaacttaggcagttgttaaataatgaaatgctggcattaacagatgtccatggcacacattattcttaaatttttaacaagcaaattaaacaacagttttatgatctttttgatgaaatgttaaaagtgttggccgagcacagtggctcacgcctgtaatcccaacaacttgggaggccgaggcgggcctcctgaggtcaggagttcgagaccagcctggctaacatggtgaaaccccatcactactaaaaatacaaaaattagctgggcatggtggtgcacgcctgtaatcccagctacttgggaggctgaagcagtagaatcacttgaacccaggaggcagagcttgcagtgagccaagatagtgccattgcactccagcctgggtgacaagagtgagactctgtctcaaaaaaaaaaaaaaaaaagtgtttgtggtgtgtttgttcatgtgtgggtgtataacagacacacattgaaccactaactatggccaaatctaggaaataggtttgggaaatagagcaagggaaatgtgagattttactttttaatcaatacaattaaactttttttcttacagttatgattcacaatcatctacatttttattgtcaatgtcatcacttagcagcttccttaaattgcccccaaatataccctgaacactaatttcttcattcatttagcctatgaataaatatgagtagttatgcccaataagtgccaagtgctgttccaggcactagcaacaagccagactacaagctttgtcctcatggattaagcatcctaacttttctgagccttagtccttccatctgtgagactgatatattactctcatagagtattctgaggatgaaattaaacgatgtgtgtaaagtacctaacatagaatatagcaccatagatgtgctcggttattgtaagctacaatacaagcatatgtggttttactgcactttgctttattgtgtttacaaattgaaggtttatgtcaaccctgcaagtctatcagagccattttccaaaagcatgtgctcactgtgtctctgcatcacattttaataattctcgcaatagttcagactttttcattattattgtatttgttaggctgatatgtgatcagtgatcttgatgttactatcataattgttttggggcacaataaaccgaacccagagaagatggcaacctcagtcaataagtgttatgtgggttctgactgccccactcacggaccattcccctcatatctctccttctcctctggccctcctgtttgctgagacacaacattgaaatttggctaaataataaccctacaatagcttctaagtgttcaaatgaaaaaacaaaaagagtctctttcatttgaacacatgtctctctcttgaatcgaaaactagaaataattaatgaggaaggcatgttgaaagctgagataggccaaaagttagttgtcttgtgccagttagcccagttgtgaatgcaaaggaaaagttcttgaaggaaattaaaagtgctactccagtgaacatatgaatgataagaaagtgaaacagccttattactgaaaatggagaaagtttaattggtctggatagaagaycataccagccataatattcccttaggccaaagcctaacccagagcaagatcctaatgctcttcaactctgtggaggctgagagaaaagaggaagctgcagaagaaaagtggaagctatcagagattggttcataaagttaaagaaaagaagccatctccataacataaaagtgcagggtaaagccacgggtgctaacatggaagctacagcaagttctctagaaattctagccaagataatagatgaaggtggctacactaaacaacagattttcaatgtagacgaaacagctgtcttagtctgttttgctttgctataaagaaatacctgagactgagtaatttataaagaataaaggttttttggttcatgattcttctcgctggaagattgggcatctggtggaagcctcagggtgcttcctctcatggtggaaggtgaagaggagctgctgtgtgcagaaattccatggtgagagaggaagcaagagagagagggaatgtgccagactctttttaataaccagcttttgtggaatcaataaagtaataactcactcatccccaaggaagggcattaatttattcatgaggaatctgtcaagataacacaaatatttcccattaggccccacctaatgggaatcaagtttcagcatgagatttggaagggacaaacatccaaactatagcaattgccctctattggaggaagatgctgtctatcactttcatagctagagagtagaagtcaatgcttgacttcagagcttcaaaggacagcctatcttgttaaggctgaatacatttggtgactttcaatgctcatttaccattccaaaagtccttaataattatgccaaatcttctactctgcttatactctataaatggaacgataaagcctgggtgacagcacatctgtttatagcttggtttataacacattttaagcccaatgtggagacactgctcagaaaacaagattcctttcaaaatattactgctcattggcaatgcacctggtcacccacgaactctaatagtaatgaacaaggagataatgttgttttcgtgcctgctaacacatttattctgtggcccatgaatcaaggagtagttttgacttccaagtcttattatttaagaaatacattttggctgtagctaccatagacagacaatctgggcaaactaaattgaaaaaccttctggaaaggagtcaccattctatacaccataatcttcaggattcatggaaagaggacaaaatatcaacatcaacaagagttgggaggaagttgattccaatcctcatggataactttgagggagtttaagactttattggaggaagtaactgcagatgtggtggaaatagaaagagaaatagaatggaagcggagcctgaagatgtgactgaattgctgaaatctcatgataaaacttgaayggatgagcaaagaaagtggtttcttgagatagaagctactcctggtgaagatgctgtgaacactgttgaaataacaaaggattttgaatatttcataaatttagttgataagacagaggcagggtttgagagggctgactccatttcaaaagacattctactgtggataaaatgctatcaaacagctttgcatgctatagagaaatcttttgtgaaaggaataagaattgatacagcaaccctcattgttatcttacttcaagaatggctacagccactccaactttcagcaaccaccctgctgatcagttaccagctgtcaatgcttgggcaagactctccactagcaaaacaactgtgactcacagaaagctcagattattattagcatttttagcaaaaatatttttaattaaggtatgtacttttttaggaataatgctattatatttttaatagactgtggtatagtgtaaacataaattttgtatgtactgggaaaacaaaaacatgacttgctttattacagtggtcctgaactgaacctgcaatatctctgatgtatggctgtaattgttattgctgtcatcatcaccatttttttcatgaccaactgctcgatccagtgtaggttttctggggaaaaaataaatttcatctcaagaacgttaattgctgaccttgtaaacaatgtgaactacatttcctttactgaatcacagcagacttagaaaaaaagagagaatagaaatcaattcaatgagagaaaaatgttgccttctatttatttaatacatcccttagctacagaattcttatttcctcggtttaacaaagtagattacacagcagaggctgatgcacatttataaaaatatatgacattttgtttatgtcagtggggatgaggaatcttttttttttggagataagagtaccaaagggcagtgagtggccccttaatcctaatagcagatacttccatgagtgaaaaccacagttaatgaagctctgaaagtgaacctctttttacatttgtacttgattttgaaacatgcaaaacatagttgaagccagtgtgagcttctctttcgtaaggactcagaagctaaatatggagccaagtttaactatccaattaaatgtactgtttacaaatgaaaacaattatattttcaattaacaggaagatgaaaaatgcaattactttagctatggcatattttattttatttcttttttgtttgtttgtttgttttattttgactttgtgctgcaggcagagttaattaactctttcagcaaaggaaaagaaaaacattaaacaatgattatgtgtgaatttcctggagtgatcccagttaggtagcaggggcttgattgtctgattctgtgagctctaaaagaaaccccaaggtaaatagaagtactgcagatagtgtaaccatgagcaacaggtatttttgtgtcaaaggaccaaaaaytgtccttgtaagtgtataggtctttggtatattctaaaagttaatttttaagttgagaaagataaaaggacaagtggtatcctgaagttcatgtgtcataaaaattattttgtggtagaaaggctaagtcactaaatattcattaagaaataagtgttgtgtaaccatttatctaatcattgtactaggaaatagctacaaaagtaaataccataatacaatacaatacatacaataaaactgctcttaatgagtagttctactgtaatcagagtcacatgaagccatgacataagaatgctttatttcatatatcttatttcatggtaccctagctgggttactctagtaacttggttaagcactagtttcaaagcaggatggtcaattcttccaacacatacaggccaatatagattgttttttcctacaaattcttgaacttcagattttacatttggattacagtctttctcaagaacaatcattttgcaacatgttttcattcctggatttgatcttagtaggactaccaaaatgcaagaaagtacaaaatgttaaaaaagaaaacctcaaagcattttggtagtcgtatttttatgtttgatatgaacattatttaaaccaatgaaatacaatatattgcaatacaatatttcaaagtagcatattcttttaagagatttcctgttacatagkcaggctatttaatttgctcagtataatgattaaaataaacttttctggtgataatgtctattgtgagtattctaattggtccactctgattgtcttgaaaattccctaagaaattaactcttttttatagatataagtgttttggcaaatgtcacagattttttacagaaggattagagaatttttttcactcttgtctttttggtatgtatgtgttttatataagacaagggtgtattccaaagctacatctagcaaaatttatgttttagtgtttcaaaaaaaaatctgtgccatgacagtcattagatctgatcatgacacttttgaaatatttagccaaagtcctcttattccaccgaaacacagttggaagcaattatttaaaaccacacataatttatctggaggttttaaaacatgcctttgtatataaatagcttttttcttccatactgctttgcttagttcaactgtgaaggcaattaatttttaaagagttgaaagaccgttccaaaatacatttatctctgctgatccctaaaatttttctgagtgaaccaaatacctaatagactctacagataactctcttgtgtagctcttatctcagccataatgttacattcgtgtgattatctaacaaatgccagtgttccctctgcactgtatgcttgtggagagaaagaccatctcccattgcttgttattgctctctagcaccatttcagtgcctgtagttgcatgtaaaaattgttcaatacttatttgttaaatgaactttatgtaatgggggacactttgtgaaaagtcagtaatcactccttgacttagtttcactcttttcataaagtctaatcatatatacacaaaaactgttgtacatatctattgttcaagtagggaataatatgtaaaatgtttttagtcattcagtaaaatcacatactaaaaatcaatgtcaatttggttttttttttctgtcattgttgatttgacagaaaaatcaatgttgatttgttttcccccccagtggacagaaatttttcaagtcaaaaatttattaaatamtacctgttatttgaaatcatttcttttaaagacattcaaaaaattatgacatcttattcgttctcacatcgtcaccatgagataagtactatttttcaacttgcagaggaaatgtcttctactcaaaaaaagaagactatttggttatattggtttctagattaataaatgcccttggatatataacatctaacaacttaaggaaattcgataaacatttagaaaattaataagtataaaaagtgttatgacccaaagcatagtttatatactatcaagtaaaaatgagctataaaattaaccataatttcacagaaaagagtatttgtttggaagtctaacaaagttgagacattatacagagagacactgtatgggtcgatatctcaagtaagccatcatctaagaaccttgcaaatgatccatctgaattatatatatgatccatctgaattatatatacattataataaattataaatatggccaacagttaatttctttggtttttctaagggtaagttaccccagtagacagtaatatcaatagaatgtttttcattcagaaagattcataagactccacaaactgaaataatagaattttggaacaagaacctctctgcatcactcagacgactccttggagagttttaggaaggccagttgtaattagttgaaacttgtctttgaacaggcgtctagagctatttcttctagtaagaaaaacgcctgaaggcactaagtgattacaggaatcgaaaccaagattttacttaaaggcatgtgtgtaacatatcatgcgtactctcctcaaaatgccctatggatcttttttcttttctttaatttaggctccccaaaaaaataactttaatgtgtgccaaatgatccattctacttcttgccaggtctggcatgatatgaagcctgacagggacaataaggggacaaagcaaggaggagtactgaattacttttcttgctttttttttttatgttaaggaacaagcccaaagaaaaacatagatcattgtgacaaatgcattgtatctttataattcattgtagttggcaagaactcctaccaagtaataaatgttaagcaaaccagagccaccattgcataggtaggggtattcttccactacagtcacatcatttggcctcagctcaaactactgactttgtcttgatgattttcttcattgcattagtaagttagcaaaagtgggtgggggtggggatccctgctttattcctccttcactgtgtgtgagcaaatgcatgcatgggtggctgaggtgcgggaaagaagaagagagaatatgcagaggttaggggatttttaaaaacatgtaagttttgttttattttgttagtttaaatttgcccttaggtattgttcaaaatgtcctcatttcctttatgacacaagggcttttagaggaatgactgaattaaaagacagtttataaaagttgcaagatatagggaaatgattgtttacaaaataaggcattgatgaggaaggagacagaagtgttgctgggatgactcttcaaggggaaagtgaaagttcagtgactgacaggaaaacaatcatagcttctgtgcttcatagagctggcctgccactcattgcccctttttcactctttgattcaaacatatacaggagggagaaagtggcattgagcctcctccagctgacaaaggaccagagaggcaaaccgaggctgttagtctaccaccatgctattcataccatgccctctcctgaaatgctcatacacccactctctacatgttataaacataaagccttagtcaaatagccacctccgctatgacactttctttgaccacttttgccaaagtggcgtcatccccctctacagagctaagtaatgattctttaagaaaccctcacaatgctttttgctctccatctcttagccaaaaacaaaacaaaacaaaaaagtctttggttgtttaagctaacacaaattacttcactcccttatgcctgagtttctaaatatagaaaaatggagataaagtcagtaactacctcacagggtgatttcgagaattatataactgaattgctacagagtgaacaatgcaggtgaagagataggtgctcaataaatgtgagacrtgttaactatcatgactactactgccattggtgagcacacattatatagttccctttcttgagctttgctttttattcagcaaattgatcgaacgcatcctctgtgcaaacaactgtagttggtgctacagaacacacaaaatctataagacaccattacctggcctaaggagcttgtaatcctttcaaagagataaaacacattactttagtgttggaacaaagcacaaaattataagaaaacttccaaggaaagttcaaaagatggatcaattagtggtttctccaaacctgctttagtatcagaatccccttgggaaagtgctgtttaaaaatatagattcccagacaccaacccaaaaatagtaaataagaatctctgacttgtagccaaggaaattcaagtgattccaatgatcacccagtaggaaatccctagaatagtcacgtacaattggaaataaaaggctttctgttaaaaggtggtcttggccaggcgcggtggctcacgtctgtaatcccagcactttgggaggccaaggtgagtggatcacaaggtcaggagatcaagaccatgtgaaacccggtctctactaaaaatacaaaaaattagcagggcatggtggcaggcccctgtagtcccagctactcgggaggctgaggcaggagaatggcgtgaacccgggaggcagagcttgcagtgagctgggatcgcgccactacactccagactgggtgacagcacaagactccgtctcaaaaaaaacaaaaaggtggtcttgaccaggcatcgagacacattttataagagttaggatagaaggaagaaagagtggtgtcacttaaaagagatgagttagttcctagccagtgatcttctcaataaggatgaaatattatcttctgctaagaatcaaacaggtgaaaatacagttcaaggtttgggaaatgtggagaaagttggaagagttgtaacatgttttacagggataactagaggtgaattaaactgagggtccattatgctacaatatctctcactgcaatttccaaggccagtttatacctaggctagggtcattcttcttaaattcccagaagcttatataaatgaaaatgcactgacattatcaataaaagtgaatttttaatatcactgacaataggatcattaactattgtgaattcttcatgtctgttaacaaccttgtttcttttgccaagtataaaatttcaaatttgatctcatgaaaagtctaggagtcagattctcataaataacaacagatctatccatttgctctttgttgatctgtagctggcatctgaatatatgaattcccctagggtgagaatgagactctataattaaagttaattggtgttgcttttcacctgtttttcttcttggtgagtgaactcttttattcctctcatttttccacatcaaattctcagtattgcaatgggtctcccacagttccaggcagtttctggttcttggggggaaatgctcctgtggcattattgattgcagccttcatgagaaggacartgatttactgtgttgcttcctgtgcagctgtgaatttgctgtacagtgacagggccttccgtggcatcctctgtctcaacttgacaggagatctggagagtgagctagctgtattgaaatgaaagtgtcctcaccccaaatcacattctgtccctcaaactaaacccaggtcagtgagaggttagcgaaaacacggttaagaatgtgctaaagggtgatactgaaattgaggctgtccccactgtcttctcaaggcctgtaacccggcttgccctcctaaaagcttcatgctgtcattccttgccgcctccttattttcctaggctttccacaactgcctgctttcttacccatactcccaatactgcatgctatgattttggggaggacacattcaggccattgcacacctgaacattctttttttttttttggctagagtatcagaatgggcacttgaccttaggcagcactgtgtttggacttatacattgttcatgtcaatgtttggttctaaaaggaaaaactgaaaacctattgcaaatggactccactgtattactgtggctgtaccacattagtctttataatgattataacaatagctgcctggtatggagaacttaatatataccacataatgtggtgaacactttgcatatacaatacaatttaagataaatattccattccagggattaggaaaactgaagctcagagggatcatgttatcttgccagtacatagtcaggaartaatgataacagaatttcacccacgttttcctaactaatactcatactgttcttttatttatttatttatttatttatttatttattttgagacacagtcttgctctgtcatccaggctggagtgccctggtgcaatcttggctcactgcaagctccgcctcccgggttcacacccttctcctgcctcagcctcctgagtagctgggactacaggcacctgccaccacgcccggctaatattttgtacgtttagtagagacagggtttcactgtgttagccaggatggtcgcgatctcctgacctcatcatctgcccacctcggcctcccaaagtgctgggattacaggcatgagccaccgcgcctggccaatactcatactcttaactattacattctccttttccaaaaatctcagtcctttaattattttccctgcttaaaatttcctaaaccttatccacacctcattatcattctttgacttctctttggtcataaattatttattatgtgtatccttccatctatctgtgtacttgcacattgttttgcaggtaaaatccatrttgtccatttattttgtgctcactcaacacctggtatatcagtgttatgcttttggagtctttggaaccgttagttttctatatggatcataccctgacttatcataagtggaagtgataagaatggcctgggggtaggacaagaagggagagaaaataaatagttatcactgattctcagagggatgccgagactaaactgaccctaccatcagattgttagatatgatcttcttgaatgctgtttgctacacctcctatctacatgcctacaggcagccttcacccagagctaaaagaaagtggaatccaaatgtttaaaaaatatttatttagaagcttaagaactctacccaaagttctcaggctaggattagtaacattaggttgtaatgtccactcttctctttcttccatactctgagatgttctccccagtaccagcttatcttgttatgcatcttagaamaattctttttattattattattatactttaagttctagggcacatgtgcccaacgtgcaggtttgttacttatttatacatgtgccatgttggtgtgctgcacccattaactcgtcatttgtattaggtatatcttctagtgctatccctccctcctccccctaccccatgacaggccccagtgtgtgatgttccccaccctgtgtccaagtgttttcattgttcagttcccacctatgagtgagaacatgcggtgtttggttttctgtccttgcgatagtttgctcagaatgacggtttccagcttcatccatgtccctacaaaggacatgaacttatcctttttatggctgcatagtattccatggtgtacatgtgccacattttcttaatccagtctatcattgatggacatttgggttggttccaagtctttgctatcgtgaatagtgccaatatatgaaagtccctggggaatcttgagagccytttgggccagcatcaagactcactgagctgtaatttagtgcttaatgccataaggaatttggaatcaatttttatacagtcatggatcacttagtgatggggatacattctgagaaatgcattgttaggtgatttcattgttttatgaacatcgcagagtgtacttacacaaatctagacggtatagcctatgaaacccaggttatatggtataggtgtatttcttctagtctacaaacctgcactgaagactgtgggtaatagtagcacaatggtaagtatttatgtatgtaaacatatttaaacataaaaagataaagtaaaaagatggtgttataatcttatgggaccactcttatatatatggtctgtcagtgaccaaaatgtcattatgaggtacatgactgtaattttctgtaatgtgtgttgcagctcaggcactactgggaatattgggtcacagtacaagtcctcttttttcatcacaactacagaaaaattacttcaaaatgcatcaactattatctcatagagtgtagcctctcatagaaagaccataagagtaataatatctacaaagtggatctgttctcacgttactcttctttctatgacagtatgtccatttgttatatatggaatgccattatttgcagtgatctatatagcttgagttttaaatcagtatacttttatcaaacggtatacctttttgttctcatctagaaacaaatagacagagtgtagtatccagtattgcttaccaccatatacaaggtaaagattcaccacaatttaccaatactctgagcaatttagttgctgacaaatataactggctattcaaacatgggtaaattgcacttctacaattattcattagggctcctataataagtatttcagatgcctacttagctgggttgctttcatttctaattcataaaggtttaaaacagatttgagaagctgattatgcaagggttggggtaaagtggagaaatagagggctttgcaactgcctgcattttgtacatacacatttacagtattaccagacctatttctgaataaagagaccagcctcttggtccctctgacaattgttatcaggactgaatggcattcagtttttatcaagcctcttctctgagttattgaagcatcccataatatcatcaagtaagtaaacgttgtgcatgtagctcttgccattatcatggaaaatagcaagtagttctcatgaacttgcacaggaatggtgcaagtaacatccctttcataacagcaacgtatccacaccatttcatttgtctagccacatagacacatagaaagrtaggctattccttttatatctattggtaaattttctttcgaataactgctgagaacttcactcctataagcagttggtgctgctggttgaagaaaatagatacattatctaaagtaatagataagtctcattaagaagatggaatagactaattcccagcatatctcccatgcgtgggaaaactaaattgtgaagtagagcagtaacacatcaattatcctttctgcacggaattagacgagcctcactgctactttgtatcacattatgtaattttttataaataaccatttatgtcagatcacctcagtttgctgccttattaaaaaaagatagctaacacttctagcttactaatcagatttattcctgaaactacttaggaatccaggtagtctatttaaaatttacatgtgtacttaaggaatccttattcctactaaggaaatagtgttaacatatgcccaaagaggtgatgttttatattaacctaaaaataaaatgctatacatttaatgatgttacaattttaacgaagatcggcttctaccaactaaagtgaagctagctatcaccatttagaacaaagtttttgaagatcttgtgttaaataatgacataatcagtttaagtagttgatcaggtttgccacatcaagttatcatatgtgaagtgctagaaaacaattcagtttcttcagtagtttaaatctctcttgctttttgtctacatagttaatctttattaacttattatgttcacaacacaggagttaagttaatgaaagcttgtatatgaagaatttgcttgctaaagtaaataataaaatttggtacttacctgttttaatttattgactgtgtggtaaaaagtgaaacaccataatgacaatagaaatgctttgcaaattatgaagtgatatttttaaaaagaaggatataacatttatatgtatcctagtttttaaaaacatcttacttattaacgaggagaagaagaagcatacattctaaagcttctgggtctaagattagtttcactccagatatgattcagagggagaaggaggaaagtcagaaggaacattccaaaattggaaaagtgctaaaagggaaagtggcccctaagtgacacccatcactctgcaatcatgacattgctgctgtgctgcgtatttcacaatctatgtttcttagtctgcccaggctttccaaacaaaatgccacagactgggtggcttaaacaatggaaatttatttctcacagttcttgaggctagaggaccaagatcaagcaaggtttcagcaaggtagatttcattctgaagcctcttctcttggcttgtagggaagctgccatcttgctgtgtgctcacaggacgtcttcttcatgtaaagagagagcaaacatgatggtgtctcttctgataagagcactggtcccttcaaatcaggtccccattctcctgacttcatctaaccctaattaccccccaaaggccccatctcaaaatatcattacaatggggcttagcgcttcatcatataaactttggaggggcataaacattcagtccataataacatgagattgagtgcttttgttttttacgtccatgacaaatcaagttaacaaatatttattgagtgaatacagaaggaaagtcacaatgcttgtggtgtaatgaataggatgaaatacatattttaagattcctgtcctcaaggagttgatagcctgattgagaatataagaagtgcatcagaagaaaaacatgcatcaaatataaataataattcagagtgaaaacagagacgtctcaaggcagtgtatggttcaatactaaatgggcagttctcaggaacatttttgcagaggagatggaatctgagtcctgagagatgttcttcacagaagcatgagaaaagaatgccctcttgtcattcacttattcactcatatttactaaaggatattatgtgtcagaggttagaaatacaaaattaatagtgcatagtttagtatctgccctcaaggaggctaacatccaaaaaaaagaaagaaaaacaccactaaattcaagatcaagtctcaactccttaaataacttacaggccttgcttctccagcgtggttctggttctccccatattcatgctcagtctcagggaactccgttcgtcttttcagaatgcctgtactttcttcctgctggacttttgcacaaactgcttcctctacctagagtactcttttcccaatctccatgccatcacctgttctactaattcctaatttctcatctaagacaacacttactccaaaatgttgttcctaaactgaccatccttctaaaaccaaggtctggtgacctttgcacggtgccttctcttgtgctgccccattccgggcatgtgaccaccctgcagtggaactatccagtactggaattggaggttaacatccaaggaacagttttgggattttttcctccatttataaaaccttagccagttgcagtggctcacgcctataatcccagcactttgggaggcagaggcgggtgaatcatctgaggtcaggagttcaagacaatcctggccaatgtggtgaaaccccatctctactaaaaaaggcaaaagttatctgggcatagtagtgggtgcctgtaatcccagctacttggaaggctgaggcaggagaattgcttgaatccgggagacagaggttgcagtgagccgagatcgcaccattgtactctagcctgggaaacagggcgagactccgtctcaaaaaaaagaaaaagaaagaaaaagaaaaaggaacctcatagcgtatttggattcatgatggaaagaagtttgcaggtagaattcactttttaaaatgtctaaaatgaagagaaactgttctcctgtgattctaggccacctcaagagaaggttatgttactgtctaaacactctactaaaaaaagaaaattgaagcacttcatttcagagctgtaataatgctaaatacaatacatctaaaaattaaaatataatttaaaaaaatagtttagacttcccatctatgaaaatgtgggtaaaacagtaatgttattttcccacagttgtactattgttgatgatctaactcactcctggctgagagtttttattatgtgcactgaatttatccacaaactgtaatacaaatatgctctgagttttttaaaatatgtatcagtgtacaacctctaacttagatgttgtttgcatcataaaataattctcccgctattaaagcctactagagtagttctcagaataatgaattccttccttatatttaaattattattcaactttttagaagtttagaatttgtgcaaatgctaaggaaaatgtttgtctcttcaaaaagtatccttcttaatcttctctttcctaagagtatgtcaaagctgcatatcacaatctttatccattttacaaatagcatacaactcaggatctcacttattttaaaggttaattgtcagactcaaggatatgaaaatatacataaatgcataacatatatactatacacaaagcaaaataagtttgactttatgacaccttttcataaacatgcatttgaaagttttgcataagaaaaatgaagagtgactctaaacagagatgatcgttgccagtttctcactgcagaatgaaatattttttctcctttaccctataacccaaatatcacactgagcttaaggatgaagctgacattttaaaagatcaccaaaagcgttctctttccaattgcaattatgccctctatctcagtgggagccattgtctgggtcttctcagctctctagcatctttctggcttgctttcattaccctgattatctattcatttgccgcccagtactcattttatgaaagatcatgtctgccatttctgtaatgagtgcttgacttttactgccagcataaacacataaaatatataataattaaagttcactagtcaccaaagtcttgagatccgtcatgttgctaatttgattttttaagcaattgcttctccgcgaacagggctgattttgcccccttaggcagtgcaagacttatggttgaaggagatgactctaacctagagagatcaatttgaatgggcaccatatatttcaaatttaaggttcattttctaccaaataacatgtctataaattatgatggktcttagagccaacaaaaatttcatcaaaatttgaacataaatgttgttctaaatgttaaagattaaacaatgtgcttttcaaaacagttaaatgttatttaattgtgtagcttttatggagaattgtttaaactctaagaaaaaagttaattggaataactacaggagcctacacaacacagattggaaacttcacaatgtgttgacttacattaagtaaggacaaggttccagaacaccacttccttattttgaacacacttccttgttytgataacattggcaaagcaccctaagtgccccatgataatgaattcatctgacctttaatcacaaagcgattaatgaactcatgagatactcatgtggctctctggggacataaagatgtgtcatacaaagtgtaatgtttgtaaatggatacagtggaacacgtgttagccaagggacttgagtagcagactctcagtttataaagaagcaggaaataaagaggtgcttccatttatacagattttctttagagataataaagatcttgatggtgtattcaaaaaaagcacagaagccagaagacctgagtttgaaagcagaatgtatcactttccagccatgtggccttgggaaacttttcttcacctctgagcctcaatctcctcacctgtaaaaggagaattagtaatatcagacttcctaaaggctgttacaagagtaagaggtacagggtcgaagggaggaggggtttgaagtgatcaatcagtcaatcaatatcattcctccctcacaaggttaagaagtaaatcaaataatatgcactgttttgaaaaggcctttataaactgcagcatcatgcatgtgtttatttttgctattcttttggaaaataggtactctgaataaagttcacagttgtttctttttccccatacacagaatggatgccttaggaagacactagtaactacataaggacatagacattgttttgtgaataaaccagatctgaccgattaagtactttatcaaattacctttttcaaatttgaaagtaacatatcaggtttgaagcaacacaggaaacttctctttttaaacaggtctctgctctgcagcagccttcagcaataactgagtttataattaaatccagcctgtgtattcagccctgcagtggggagctgggcagaccacttcacctcaccggcaggagttaaatgtgatcccatctcccaggtccagtactaacacactgtcattctcattaagcatgtgtagtaattctttaccaattctaaaaaactactaattaatttacagtacttctggtcacacataattaaaaaccattttcatatctttgattaaaagagacacaaccttttctgcctcagttcattgtcttacccgttcttagtaaatcataatcacttccctggaatttctttttttaggagtgtaatatctgctcatatcgccttgacttcaggctcaagctcccattgcctagaaaatgattcaggaaatacaaccctcagaagacaaatactacctcatcttgaataagtgaggcagtcatcttttggaacatgggcacttccaatctcagaataaatgctcagatatattttacaatataatcagaaaaccaaagaaattcaaaattcacttgaaggattatgtggccattgttcatatacagtgcatatgtgaaattctctctcagcgtggtgaaatgtggactcaacacatgatcactctgtactcatttaaagatgcacatgtcataacagatattactacatgttaatacawattaatacactattgaaagagcactggaataggagtcaccatctctggttctaaaacggactcatactttccaatgattggacttgctatatcacttaagccacctcaacttcaatatcttcatcagtgaaatgagaacttattggcttatagagttattttctctgaggtttccaaaataagtcagaaactatagccagaaggtcattctggcagcttgcctgtttttacaaataaagcccacttgtttacttactttctacggctgctttcacactacaaaggcagagttgagtagttgtgatggacaccatatgggccacaaagtctaaaatattggctatctgacccttaacaagaaaagcttgctgacctctagtctaaaagatgatagttatgaatttatttgaaataccatgaagtactattaacctatatgatagaaactcttggtggattgaaattaagcaactgccatttggctcaactagctagaagaaatagttaaaagttcaatttaaacaaaggaaatagctcctaatagtttcccttacactatttgatattactgaggtattagatgctatcaataaatatttgttgcacttaatgttaccaactgatcactaagagattttgcttaagaaaaataatcgattgatgattgattcacaggaagttgatagaattgatttttacaactctgatatgcaaattgtaatattagatatgccaatcaaagtgccactatgcttaattgtttaaatcttaatctttgagaagtgcttctgcttcgatgcaagattacctacgttttccaaagctaggatgaaaaaattgatgaatgaatgaaaaacctattgagctaaagttttttctgaaaatcatctgcatgctattattaatactttctcagtaaccatggagaggaaaattttgtgaaaacccagaaaatgaatttaataatgtggatattatgagccaaaatagatttattcagtgtgtgaaaaaaataactttttttcagaaatttcaaaatttctttctcagtgataactgacattaaacagtattgagtaatgggactctctcctaaatatctttttaattttggttacataaaactcataagtaggtactgataaaatatttttgaaatattaaaatggttattttatcctcacgaatttctacccccaaattgcctcaatacttccaaattgaagaagtaccaaaaggtcttgtatcatagagtttctggcgttacatagctataattatctttcactatgacaggacaagaagcttgaagacctagggtgtaagaaggatattcaggagaggaaaggaagccttacttcttctgaccagaggattctaacagaggtcaggagaagagaaaggcaagaagacattagatagattgaaaggcacaacaagggtagaagacctaatgcttctcttccctttagggtctctgggggagttcccagggcacaccaggctctttaacaacagagaagacctcagatcattaagaatgcagagcagcagggtcaggaaaaagcacaggttcaataatcattcccaggcctccctttctttcctgtgcctcgcatgcggggttagagcatatggacctgccttgggcccctccacagtgaataacaaggtgaggtcatcataccatctggagggctacagaatcatcaggggctggataaagaaaatggcagaggctcagaaggatgtagagcaycccaacaaaccaaaggaggctgagtcagcagggaggagcccataagccctacattagccaacttttagcacctatagcctttgcagactttagcagcagtcacctattaatctctaaaactgaacccaagcccatcccacctcaaaggagagctgccaaagcgaattcaaggacctgcaagagaccagccaccacctttcccctaaatccctaatttcagggatataatgctgtcctccataaatcctgataccattttgaaaaagagtaagrgaaaagagaagaaatgggaagaattgagtaattctctcaagtagattgagctaaagctagagacatgttaaattattagatgagattaaattttaaatcatattgggctaaatttagttttttccccactgctcagtaggcacagtcctcctaagatcaattaagttatagagaaaagctacattttctctgcatacccaaattgtagcatgaatacatttgctatcacactataattatattgtttggtttagaggaaacatattgatgagacgtttactcagggtttaagaaatctctgaaactaaagaagatagcttttctctgcatacttacatattagaagctgtgtgagataatggagagaaatgtgctggaaggcagacctgagttctaagcccaattcaactatttattatctgtgtgagcaacttaaaaagtcatttaaactctacagcagtgagattgtgtgttccatgtgaaaaatctagggaatcattaygccggattacttagcgtcttcatccataaaatgggggaggagaaacagacggggaagcaataatgtctgcaacctttcccattctaatttcctagtagaaatgactaaaaaggcaggtgtcatttttcttaggtaaccagtaaccagtaacttttttagtttggttcagtaggaattcacctatgggccatgattccagaaaagtttgagaggaacttattgacagcgatggtatttaaggacaaaatcagagtgacctatgtgggattagaaatttgcgtccaactttcagcaacctgttttgtaacaaataaattaatttgaaaatcatttcctagagtagtgactaaaaatggtaagggatcaaaaattagtgtgagtctcaaacacaaatgaggctaaaaaggctcttcaagatgaatgcctaaacctgttggatttctttaattttaatatgaaagaaggatcttttgattcctctactcccttcccctgaaatttcctcatttataccaataaagaaatcagtgcaattttcaaattgcaattaagttttatggacttctaaaatttttctgttcaatgggatcacaaatgttttaatattttggatgaaaaaaaggaaatgagatgtccgtgtcagtgaatcaatcattcattgatcatatgggcatgtaattctccattaagaagtatgtaccggaacaggtccaaagaaagaacaatagtgatacatgtgacaataataartctagctttagagttgcaatagccttccgcgtgccaggtaatgagcttttcatgcatcttgctcactgagatcgtcacgtgtggtcttattaattcacaccacaatgaccctcaaaagtaagtgttgttatgcatcaccatggtgtaaaaatagcaggaatttttctgactatactccaaaaagagattttagccgttagttcatcacagtctaatagctaaacttatttctaatagtttaagtatttacagccccacaaagtctatacttcagcacttcaatcccatagattaacaataaccacagtaactctttgctctctatgagcaaatactgccatcttgtggaaattgcacgccaaacagaacattattgttccataaactcaaaagtttttcttgtgtttattaagaattttgcaactcaatttttgcattgtcatacatacgcgcacacacacacactcgcacacatacatacacattattgttgcttataattacaaggtacaattctttagattttcaagttcaatttaaaagggccagtgctttgggaagattgaagrgaacatatctctttgcttattataagaattcatcctattcatcttccaggcagtgcattatattttaccacacttgctttacataatctttaaattgggtttttgttaaatcataaaaaggaggccatagtgagaccattctgatggaatttccaggaacactagattttgtagcaaaatgttatgacagaactctggacttagagaacactttcattcccttccaacacttgtagcccatgccagcctgtattcctggaatctgttgtcaggggtgactgaggggtcagatggtccaatttctctgtacatccccaaagatgaaatctccctgcaatgccccagccacttgtgctgccgtgagcataaaataaaccatacaaagagatttttgtggcatattcgtacttgaagcacctagagagggtgcttccttctttcccctcgatgatctcctatcgctcagctggctgaacctaaaaattctgcaattaaatgattttttttgggtttaaggcttttaattcctattagaatttaaataggtgaggtatwatatatatatatatatatatatgaggcatatatatatatttcaataatgatttctaaagtcaaaatattttccaagtttagaaagaataaggagacaaaattaaataaaatgaaatgcaagggccccaaataccactgagaagaaagtgtaggcagtaattaagttcctgaatgaaggaaggaataaatgaacatgaattgagggcattaaaaaaatggcttcacagtgtcactcaagcctctccggtggaatgtgcagtcgtggtttagaataaattttgtacccaaggaaatgtctggaatgaagtcattcttcaactgtttattaaatggatagatgaataaaacaggaatggaataaattagaaaacagcatcaatcgtaagaaaaaagaataggatctgatatcagagtttaggattcatttaccaaaactgtgttgagtatattccatcaataaatatgcacctgctctgtagkaggcaatatggaggatgagtacacactctcgaaaatggaacagactgatcaagtaattataaatgatgataagtgctatgaaggaaaattcttacactttcacagtgtattagttcgttctctcactgctatgaagaaatacccaagactgggtagtttataaagaaagaagtttaattgactcacagttccccatggctggggaggcctcaggaaacttacaatcatggtggaaggcacctcttcacaaggcagcgggagagagaatgagtgctgagcaaaggggaagccccttataaaaccatcagatctcgtgagactcactatcacaagaacggcatgagggaaaccacccccatgattcaattatctccacctgtcctgcacttgacacgtggagattattacaaggtgagatttgtgtggggacacggagccaaaccgtatcacaaggctactgaccaatatggtgtgatgcaaataggagagcaggataacaggatctcattttgtgcccagatgtattctcattaagcaaatgttgctgtagttgccttttatatctacaagtacttataaactcaaatttaaaaagaattatttgttcaaagatgactacatttttcctccaaggtaatcaatggtgctctgactacctagagcctttaggtgggcaaatacataagggatgtgccattattttttattattatggtaagaattcttaacatgggtgctattctatgaaaatttttaatgtacaatacagtattgctaactatagttacaatgttgtacagtagttttcaagaacttttccctcttgcataactgaagctttacacctatcgacgagcaataccaacatcatttaaatgatattcatgaataggccaggaaagtaattttgataccatgattacatctttgtgtgttgcctaacacagtgctggaaatttctacaagtagttgcttctttggatcaagagattatttcccatgtgtatttcttaaacctgttacttggaaagcaaaatgagagaaggggaatgaaggtcataagtttgggaaatgctgagttaaacaaaatcatgccgttttcttttctgctggtcttctgagagtctttaataggctgacatctttgtaaattcccaagagtgtgtttctcagaattaataaccacaaggcccttttcttacagaggtcttgtaggtactggtttgctgtgaaatgcacttttggaaattctggaaatgcaaatggctttttctggaatggaagctggaataagggtgacatataacccattaatattcataatcattttagtaaattcaattaatcaaattaattactcttctagagcaacactctagacagatacatttcacaggaagcaaggagaaaaggtccaggttgtgggggaggtttcagaacagtctcagtcctggactgccagcacggggcaccagagctgaggctgtgggaacgtctgggagagatgacagggacctgagaccaaccctctaccagagccttaagggctggtctcactctagtttaactcagattaaacactgacccaacttccaatgcacaaaatcttcttccctttatcatgttgcttgttcttctagccatgtggatgacatgaaacaggtaaaaaggtcactacaactccattctctgaactcttaaattgtaagcagtctcaccccaaataatccaagaccttgggcaagagtacaaatataggttcacataccccaagtctaattatgtaaaaattatgcattaaactaaaacctgtttgatataatatattctatgttcttatctggacaaatataccttcatgacccctgggaggccaggtttaagtttctatgtgactagccaggaggtctgaactgacccaggagcacagggctctggggccctttctttccacctgcagctccaacttgcacgctgaagtgtctcctacgcaaggctgtatacacccgagctcactcatctgagctctgtccacactctacaaactccaccctatagagctatggtgcacccgtggctgtaagatcttctgccaggaggacaaccctgggaataggcctggcaggccctggaagagcactaagctgtttggccaggaaattccagggaacccagaggacgatgcacactctgtacaggcacacagccttggtctgatcttccttgccctgtgaaaaagggcatagctggaggagggccacatctaggctggcctcaggtagagcctaagaagcactgggaattgagaataattcctctatgaaaaacacactttaaaaagctgcagtgtgcagctaccctcagactctggggaggggaaaaagaagcagcagaagaaaaagaagagggtttttcctatttgaatttaactacttctgaaagcctctggtcaggttttcttcttgttttccaaggtaagattacttcccctttggcattaaaagggaaactagatcagttgtgcgaaaaaccaaaaaagatgtattttatcaacttgaaacttatcccaaggcttcctctcacactgtgttaaataataggtcttcttaattgaatttctttgtgtgtagcatatgctgggtgacattacgccagcatcttgctctaagcagcaaaacgttcttcataaaagcattaagatcctgagtatcattctggatgtaggaaagggacacagaactacaacaacttgaaagcatataaaaacagtgcctctgaattgtgattgtaaaaacacactgaagcaaaccaggaggaaaatatttagaattatagaatgaaaccagaagaagaagaataggaagaaaaggagagaggaagatgggagggtgggatgggtgaagagagagaggaaagcagtgtggtgcaatgctgtctgtagaatcaaagcaatgatgactttctgtttcctagcattccatctaaaacaagcagatctatatattcatttccctttgacagccaccatcctacagaggtgggattataaatggatgtgttgtgaaccagggcgataactatgtctgtaataacacatgcttatgttctttatcccaaggatcctggagcttcagcagaatggtgacatggacatcctgaagcacaaatggtggcctaagaatggccagtgtgacctgtactcgtcagtggacacaaagcagaaaggaggcgccctggacataaagagctttgcaggggtcttttgtatcctggctgctggaattgtcctctcctgcttcatagccatgctggagacgtggtggaacaagaggaaaggctcccgggttccatcaaaagaggtacttgattgagagatttggctctaaattgaatcaacaagcaggctgtatttccagggaggaccatcccagggaggataatgggttgggggtggtccttgttttttcgtttcttgaagattaaaaataaagttgtgaaatataaaaattggtaagatcaatatcaatttccattttaggatatccccagatcagtgaagaggagactatagtgtttgaaagacttagaaattcatataccataatgggctttgaaattctctcaaatctcagaatagattttaattcagtgatttttaaaggccatgattcctttgaccagttcacagagatacttaccaytttgtttcacttagttgtttaacttgtaagtaaattcctcgtatctctaagactagccccccaaaaatacaatactgtaataaaaatgatcagaattttctcttcaccactagtgactgcctccttctctactcatgtagacctatagaagctcttcgatggccccaagcttatcaaatccaaaatccacatcatgaaaacatccaaatttcaatktttctcctttactgtggagtcagcttcacttcagggccatattaaattttatctcaatatctgaaagaataattacagaattacacatatctcttttatagtggcctgagcattgttttcatcaagaagtatgagacttataaattaaagaaaatctgaagctaaatcttgattaatttatcttatttccattggacyaaaggggtgaaaatgttttaactgatgaagtcatattcactaaagcttcacaaattgaaacaaaaaccaatctgaatttgctaaacaattttatgtgatggatagcttcaaagaaacttttaaagtttctataactagaacttggctgactaactgatgcctgaggcaactcctgaaaggatctactttaatgcacaataaatacggcttctcatttgcatatgaattgttgcacattaatgtgtttttttcaaacagggtgatttcaaaagtagtgtaaggattccttcttatcaccttatatgcaaaattgatcagcagcatttataaggaaaagcttggctttagcaaagatgaattttagcttcctacctgtgtgaatgagcatacattctaaatatgtgaagaatgaattataaattaatcaagtcacattgtagtgttttctttgtggaataagcttctggtatctccgttgacattgattcaatgcaaaagaccacattaatgcaacattatagctgagactcatatttttaaaaatctggaaagtaaggactccccaagctccttatattttgaattactctatatgatattaaaattttgcattattatatctgttgatggatgactacattacagttgctgtgggaaccataaaattatatgtctcaatcctctaaagtctcagtgataatattgcattaatggatattttttattgaattttgaaataagaagggagaaggaaaaacagtgatgcacatcaaaatatttttcactgaggaacactataatagcacaatgaaaaaaatacatgctccattctaacttgtgacagctaatccagatcctatgaaaaaatattttctcctcttatgattaatagatatcttaaattctcataaatttaatttattgagtttggctgtaaataagactaataacaaggataattttatttccttccagttttatttctcaartattgggcgttaatactcacttttagtgaaaaatataaggaacttatcaatgggtttcaattccaaaaatctgagattttacttatatttttgtttattaactgccttcttaccaagacgccattagcatagcttaaaacgtctttggttttgaggtcagttagcataaagctggccctaaactaaagctatcactcacgtgccctgacttgaaggggtccctaaatatctcactgacctcacagtattgactgattcaggtgctagataccttgagtgcataaatccctcaattagaaattattttgtgttgagtattgctctctctaaacaatcgcacatatccttggcttacaaggaataacactttaacagtcactaacactttagtatgaaatagcttactatatcatttttttcaagaatggaaacttaagtttaggagtaagtggttgaaaggaacaaaaatttaacttggaatgagacgccctgaaaagggaggaagcatgtataaagaagaggtggggggtagagttgccaaaaccatactttctattgttacaattttgcctgggtctgtcttttatagaatggcaatcacccatcaactgcttacatatctttgtagttgcatgtggcatatgatcactttaaaacctttactgcaagaaaaatatttattgtagataatcttatctcagaattggaatcccccagaacttagcacagtgcctggctcatactaggtgctcaataaatatttgttaaatgaataaaccccaaagttcagttaattacatgtttgctgaactacttttttttttttaaccatcaaagctagtactgatgagaaccttattttctttttcttcatctccaggatgacaaggaaattgacctggagcacctccatagacgtgtaaatagcttgtgcacagatgacgacagcccccataaacagttttccacctcgtcaattgatttgacccctctggacattgacactttgccaacacgacaagcactggagcaaatcagtgatttcaggaacactcatattaccacaacaacctttatcccagagcagatccagactcttagccgcacactgtcagctaaagctgcttctggtttcacttttggcaacgtgcctgagcaccgaactggcccttttaggcacagggcacctaatgggggctttttcaggagtcctataaaaacaatgtcatctattccttatcaaccaactcctaccctggggctcaatctgggtaatgatccagaccgaggcacctccatatgagcatcaaacaaatctcttcactgtttcttttttaggactccctttgcaaggagcaactgtaatattgtgggactaacatggatgtaacgtttaaaaaaaagatcaggattattagtaacaattctagttttttcctcccaccttctccctctcctctctcctctatgattttctctctttccccctcccttcctgtacattttcctccactttttttcattactcaacttgttccccaagaaggtagtgtactaggatcctattagtctgcttttcatatactgtacatcaagtataggaaatgtgcactgagtatactaaaagtatatgcaggattaattttacataaaggcctcttctgtaacatttctctattttttgaaatacaattgcaataacttcagtctttttacattcttctgctgcatccatacaatgctccactgctgttgagtgtcctttaactgtggaccaaaggcaacccctgcagtgtttataaaacaattttaagaccattcaggccacataagatgagaatgcaattttgtaggattacaaaaaagccattaatatgccagtcaagactacagttaaaactactcttgcactgcaacagtgcatatgacctttatgtgattgtacagtattaaaagttttttcttatgtacagtaaactttatcatatggcagaagcctctattgtgttaaataaattagtatttcatatatatacatatatatgcacctatataatgtgtatatatataaaaaggcagccattgctattgcaattcatttaataaagctttagtttaaacaaaagtattgtatacaggaactatgtatagtgcaggggttcttttcagttagaaaaggcaggttgctttaatgttattctgactcgcattgtttgccaacagaaaatattttatacttttgttattaaagcatccagggcaatttaatatttgttcctagatgtaactcatttgaataggttttgcatttgttattcagcagtgtataaagctaaccttgataattttacttttaattaattatctaaatgaaaaatgctattagctgaaccacatccacaacagcacatagagctctagaagagttgaaacatagatcattgaaggttaaaaatcctcttccaaagcagcaagtcaatcaatacaataatgatatttggggaggggtgggagcccttaagaactattgatgtggccttaaattactgtcatttattatcctaaagaagaaaacataataaccataatgggctctcaactcaactcccttttttatttagttctatttggaggagttatgtattttttacattagtgccaagtatatagaaggatgacagcaaaaacagtgcctctttgtgcacaatccttttaaagtagcattcttacttgttagaaatgtagaatgaactttgtttgtaatccttaaattaaaatgtggtaagtaggaagcaagaacttattctgtgtttttacgcagccatacacttactttaatctaactcattctgtggctaggattgatataggaatcaacctatgtgatttgctttaggagaaattaaaaggtatattcttaagatatattatattttgatgctaattctgttctggggagcatcttgtattgtcactgttttgtactaaatcttcaaatattgtctactgtgtaaggcagaaaaatttcttatcatgcaaaaaccattttgtttccagggtaacaagtaactaagtgcatgcacaacttgttttcccttgtaacattcatgatctcatttacaactctgattttaaaacaaaaaaatctttacaacaagctatatagggacataccagatgttgcagtgattttagctatcaacaaactgttaaccatgtacaatatttaaaataggcttattttgatgtatcgcctattatacaaacacacaaaacatttttggaggcctcagttatgagtgacagagctttctgtgtataatttgtctaaataatttgtctaataaaaatgttttctaaacttgctctcatactattgaagtcttaactgtaagatttgaaaatgtttactctctcacagattgaactaaatttttctaaaaatttatcttgagttaattaaagcataaatcacattaagttttactggcagaactatgccaaaatgaatggctctctaaaacattactaagtgatgtcttaaaccaatgagagactgcctttctgctatttgagactatttgaaccaacaatacatttgtttttctctgtggatgtctctgtgagcacttttttgggaaagatttatcctgtttcatgtaagcaatgcaaccattatgataatatcaggatgagggtgtgttacatcaaaaaaaataagaaagacaagaaaattaagggtaattattaaacttaggatttatttcttaaaaattgctttgctagagaattattcgtcatgctgaatctattaatttgggaattaatttaggttctaagattatttctaatagttttcctgcatttgaacaataattttaattcttccagcgtttaacacacctaagggatatatatctgaaaatgtattttgaaaacataatttactaaaaaaaaaaaaaaaaatagttctctattgttctaaagttccatccaaaataattctttgaatattggaactaagaggaaatttagagatctagactgttgacctcattttacaaatcagggaaaataagatgctaagatgctgtgatatgcccaaatgtttgacaacctaaaatgtaaactgggtcttcttttttaaaactctgccacccttcaatcacaccaacataggtcctcatggattgtaaatataggctccaccttctcctctcaccaagcctaggctacaaatctctaggatccttccttccttgtttgggacacatagatcatctgattccacttttacacatgggaaagtgagtacctcaggttatttacccagggccatagctagcagcaaaactaaggtcggttcctgtttctgtctacacttggttttttggcccattgtttgtcctggtttgcaacacttagaccaacctggctatttcactacaagacaaaataccttatatccaagtacttttattctattcaaatgtccaatttaccccactggtgaatcattaagatatctggtatcactgtaccacatcagaacttatgcacaggctttggtttaatcatacatacttaaagttgtaagactgccttcttcctcataccattaaactacaggcaatttgtcatgttcgtgatcatgttatttttcatctcttttagtttgggattggctatcaactgaataaatacttttaaaaatagactttaccgaatggtactttgcttcatcaatttaaataaaagatgggaagatccatttaccctgcatgatacttctaagacacacaattgaataacaagttattactattttataatcagaattttccaatggtgaaacacattctagattataagtatagtaaatcatgcagagaagagattatgtgctggtaaacataggttttatccttaaatataaatgtgatgatgactgataaagtacaatggactcactaaaatttggcttccttccagagtacttttctttcaaaaaacaaatcttatagccaaccctcatgaccaaatattaataaatgattaacaactatggccataattatcatttcaatgaaatttggtagacactctgtcaacaaatattttagaagacaccctcttatgaggcagcatatgtgagcttccctaggtagaaattacttatctgacactgaaaagtcagagaataaagctataatttatagaagatttgatagatgtaattcaattctactagtgttaacagagaacctattattttgaaagccattgtgctaaacagctgggcatggcagaaatgaatgtttaggaatgggtctgggtgtgttccaacactcatctctttcctggctccatatcaacatgcaggatacggaggccacgttacagaatgagtcaccccaaaccagcacagtcttcttggttgggtgactgactggaccaattcatcttagtagttctcaagcaccaattgaaactgtcttcttggttcagaccacctccccaaagaagacttggaaatttaccaacatgccagatcctgaagccaaattttcaaaaatgtgaaaattcctataagccacagaaaattactatctaacccttcatccttattgatacctgcataccattcagagactgactcctacccttaggtgtcctcatcggcataatgtagaccataacaactccttttctatccctgcaaatctaatgagtcatgataattcaagctctgcaatgtttcaacttgcctcaacaggacaaaacatagtaaatcttattcaggatctttttcatactgcaactaaaactccgtgctacctttcctgtcatctaagacacaggatgcagtgtggcccataaacccaatgaatgtaaagtatccttcaggctgcccaccatgatgatagcctccaacccacacatacctccaggagactagaaacctcatggttttgcttcattttatagagctgcacagaggcatggaacagttaaagcacataatgattcagcctaccactgggatagaaacagatcaaggaacttgctctcatttcttcacctgaatttttcaaattcctatgtcgtcaatagtattcatttgctttgtttccatgtaacattgatgacaaaacaaaaattgttcacatttgagaatttttttcatatctaagagctctatcttgacttgctacaatttaggactcagtgacatcttttgcctaattttgtatcatagttcctagaatttcttcagaatgaagaagagaaactagctgtgttattcaaacatattacctacctcatagtatagacatagcttgtctagccttcatgaggaaggaggacctggttttcttttggagaaacccaatacattcctaccttggagtaagcaacacatttcaacagtctcaaactattcatgatgtggttgaaaactcacaaaattttcagcacattaattctcattaattaaaaactaattaagctttcctaacagctgctttacaaggagaaacatatgtcacaaaaacaaagaatgatacagtgtcagaaccagagaagggatgacaaacattgcttttaataaatattttgccagctacaagctttgaaatatgagtagaaggcaagctttaaattgttatattttattattaaattgctgctactgaaaaagtttaggaattaagtagcctacttaagtggctgtttttaatttttaaaaattggacatcagtattattttttaaacacacatagatacctatatgcaaagataacccataacttcctgaatttgaaaaataaacaaatacagcttgcatattcgctacacaaaagattcatagtaggagacctttaagaattagttcttctgatatgtaataaaataagattcaatttacaaaaattcaagttatctaaagctttcaggatcacagctatttcctggaggcaagggtatcagtatctatttcatactatgtaaaaaagtatctgatagttaatatttaattcctttccaaaattaggttgactttaaaattaaatgctaaccctctattaatatctgtttacaaaagttatctataagatttattgctagaaataaaagcacactaaaattaagctgaaaaatagaagttccatatgttcagcttatctcatttggctttttttttttttttttttttgagacagagtctcgctctgtcacccaggctggaatgcagtggcacgatctcggctccctggaacctttgcctcctaggctcagg

SEQ ID NO: 96765 - DNA, 12700 bp, Homo sapiens
  misc_feature (1)...(12700): n = A,T,C or G
ctactgtgcccagccaagaataccttctttaatatactcacaaccaatgccaccagcattgggcagcacttcagcaccatgtgtaggggccaattaaaactgtgaaatcagcaacaaaaacttgaaaaacatggcagactgtgaaaaggacccttgttcacagtatgagagctaaacaagaggacagagattgctttcttcgacctcagctgggaatgtgcatgtcaggtgacttaaactctttgccacactgtacacgtccacaaatgactgctgaactaccttgagtattaattccggagttacaaataaattctagtgactaagcaaattcacaaatacagaatatgtgaataatgaggattaaccctagttaaggtcaaagtatttcagaaactattcaaaagtgtatctgtgacttggttaatcatttagtatcaactttaagtcaacaactaaacctgccttttaggaaacactatgaattattttttaatctttttttttttcttcccaagacggagtcttgctctgtcgcccagagctggagtgcaatggcgcaatctcagctcactgcagcctccgcctcctgggttcaagcaattctcctgcctcggcctcccaagtagctgggattatgggcacacgccaccatgcccaatttttttgtattttgtagtagagatggggtttcaccatgttggccaggctggtctcaaactcctgacctcgtgatctgcctgcctcagcctccaaagtgctgggaggcatgagccaccgtgccaagccagaaacactacgaacttttatacagtgaagacggtgggaaaattgatgaaatcatctgttttactgggactcgagagataatattcaacagcagaagcctacttcttaccctggagaaaagtgtgttgaggcagtgtactttttggcgctcagttacatatgcgtagtactgggttactcccttcagagttagttcctccatcaggttaatctcatagggtttctgcaaatgggaattctggggggggagcgggaaaaagatgagtcgtcgtcttaaatgaaagcagagttcatctcaaattcaaaatataccctatacgtttctgtccgataaactcttgctgtaagggacgcaactctcttcaaaacaaaatatatgatctgtcattacagaatttcccccctgccaccctgagacaaaatcttgctctgtcacccaggctggagtgtagtggcacgatctctgctccctgcaacctccacctcccgggttcaagtgattctcctgcctcggcctcccgagtagctgggaatgcaggcatgcactgccataacagactaatttttgtatttttagtagagacggggtttcaccatgttgcccaggctggtctcgaactcctgaccttgtgatctgcccgcctcggccccccaaagtgctgggattacaggcatgagccaccatgcccgacccgatagaaataaattaagatataagatctcaaaaatgcagctaagttactacaggttgagtattccttacccaaaatgcttaggaacagaagtgtttcaggttttaaattttttctaattttggaatatgtgcattacacttagtgactgagcatccttaatttgaaaattcaaaatccaaagaacatttccttttagcatcatgttcgtggctcaaaaggtttcaaattctgcagtattttggatttcagtttaggatactcaagctctgttttgtatatagaataataccggaatcaattcagctagcaccaatggctatgtcatcatgacaccaaaaactaagtgaaagatgaggaatttaattaagttactattacaaccttcttaaaaagtcagttaatttacgtaaaacaaatctttaattgatcaactgaagaaagagccaaaggcttgaaataattagcataaagtatattcacagatatgaagatgtaattacaaataaaagcatactcaaaggtcacaggatggcactgattccaagtacagatttatactcaccatgaacttctgtacactaagagggaaagtagcggaatatagtaaaatctgcctgtttttaggtagcgtgagaataatatcctccattatctgcacaaaatcctgtgacagcaacttatctgcctgcagtagaaagaaaagacaattttaaaaacaataaaataatgtctaaggtcttggttaatacatggtcaaagaataaggcatcatccaacaaaagcatccatgaaatgttcctggtggaaaacaataaattctctccaacactgcagagagtcaaatatgcagaagggggcaaaatctataatccccatcttctaggggaaaaaaaaaattctacactacacagacaacctcccccgctttctgtaacagaatttaattaatttatttatttttagagacagcatttcactctgtcacccagctggagtgcagtggcataatcgtatctcactgcagcctgaacttcctgggctcaagtgatcctcttgcctgagcctactgagtagctaggactacaggcacatacctccatgcccagctccacaacagaattttaatgtgatgattctcattaaagaggtagtatggtgtagtgtttaaaagtacgggttctggccgggcgcggtggctcacgcctgtaatcccagcactctgggaggccgaggcgggagaatcacgaggtcaagagtttgagaccagcctgaccaacatggtgaaaccccatctctactaaaaatacaaaaattagctggacgtggtggtacgcacctataatcccaggtactcgggaggctggggcaggagaatcgcttgaacttgggaggcggacgctgcagtgagccaagatcacaccactgcactccagcctaggcgacagggcgagactactccgtctcaaaaaaaaaaaaaaaaaaaaagtaagggttctgaggccgggtgcagtggctcacgcctgtaatcccagcactttgggaggaccaggcgggcggatcacctgaggtcaggagttcaagacatgactggttgatatggtgaaaccctgtctctactaaaaatacaaaaattagctgtgcacagtggcaagcgcctgtaattccaactactcaggaggctgaggcagaagaactgcttgaacctgggagatggaggttgcagttgagctgagatcgcaccactgcactccagcctgggcaacagagcaagactctgtctcaaaaaaaagtacaggttctggagctaaactgccaggttgaaatcttgcctccttcatttctcagctgtgtgggaatgttacagaactactctgtacttcagtttccacaactctaaaattgtaaaactattaaaatttggatgtttacataatgtagtaactactttaccgggatttagaaaaaacttggctaaggccaggtgtggtggctcacgcctgtaatcccagcactctgggaggcttaggtgggcagatcacttgaggtcgggagtttgagaccagcctgaccaacatggagaaaccctgtctctgctaaaagtacaaaattagcccggcatggtggcacatgcctgtaatcccagctactcgggaggctgaggcaggagaatcgcttgaacttgggaggtggaggttgcggtgagctgagatcgcaccactgcactccaagcggggcaacgagactctgtctcaaaaacaaaacaaaacaaaacaaaaaagaaaaaacttgactttcaagttatccagccactcctcttcttaaaaattaaacctaaactctggcatctataagacaaaaagctgaattcctatgaatgcctatctattgcatctgaagtataaaacgtattttataagcaaattagaagttggatgtctacatactatagtaattacttgacaggatacctaccttataggtttcttgtaaaaattaaatggaaaaaaaaaaaaaaaacaaaccatgtaaagcacttagtgctggtacccagtgattaataaatgttctctctcattacttaaagataaaagtctgatttgaattaaatcatgttacctaaaacacaaaccaggccgggcgtggtggctcatgcctgtaatcccagcaatttgggaggctgaggcagtaggatcacctgaggtcaggagttcgagactagcctggccaacattgcaaaaccgcgcctctactaaaaatacaagaattagctgagcgtgggtggtacataattgtaatctcagctactcagaaggctgaggcatgagaatcacttgaagcggggaggcagaggttgtagtgagccgagatcacgccactgcactccagtctgggtgacagagtgagtctgtctcaaaaaaaaaaaaaaaaataataataataataaaacacaaaccaaatgtgaaaataacctcatgtcaaaacattaacaacgctgatacactatagatcctccttgacttacaatgggattatgttctgataaattcatcctaagttgaaaatattacccaaacctactgaacatcatcgctcagcctagcctcctttaaacatgctccacttaccttagcttacagttgggcaaaatcacctgacaacgccgtatactgtagagtatcggctgtctgccctcaatcatcatgtggctgactgggagctgcagtttgctgctgatgcccagcatcatgggagtatcatatagcatattactaaccaggaaaaatatcaatcttaaaaattcaaagtacagtttctaatgaaagcttatcacttccactgaaaaactgtaaagtgaaccatcttaagtcagggaccatctgtacatgtacaaaacatggctagatcccaggactacagattttaataagtttttaaaaggcatttataacatggtgagataatacatgtaacagagattaaaaaccaaacagtacaaagtagtatgcacaaaatgagaagagacaatatatattatatgcttttaaaaattaatcacagagcagaaagagacttagaataaatttggcattgaggttattcactcctctactaaaaaattaaaacctaatgtctgctatctctaagaaaaagacaaaatgctgaattccaatgaatgcctataatctactccctctgacgggtaaaacacattttataagcaaattaatttaaactgattgtttatgtgtttattagatcataaacacaagcagcttttgcttcattcactggcagttataagcaaagcacagaaaagtacagaacagtataatgccaaatgaagagacattacctcatccaatactatcatctggacatgatcaacctttgctactcctttcttaataagatccaggattctcccaggggtagcaatcaccacgtgcactatgcaagatttagaaaacatacattctcattaattttaatttgagcaaagaggataaaggtttataatattacagtcctgagctgcttaatgataattctgagaaatgcattgctatgtgatggtatagcctactccattgtatagctccattataatcttatgggaacaccgacatacgtgcagtccgtcactgaccacaacattgttatgcagcacatgactatcttttattagaaacaactaggccgggtgcagtagctcatccctgtaatcccagtactttgggaggccgaggtgggtggatcacatgaggtcaggagttcgagaccagcctggccaacacggtgaaaccctgtctctactaaaaatacaaaaattagctgggtgtggtggtgggagcctgtaatcccagctactcaggaggctgaggtaggagaatcgcttgaacccaggaggcagacgttgcagtgagccgagatcacaccactgcactctagccagagcaacagagtaagactgtgtctcaaattaaaaaaaaaaaaaaaagaaagaaagagaagaaacacattgtgttatagaggtggaaataacacaaaaaggcacaaagatgtgttttaggataaagacttccatttcaccacaggatgcttaaawaatatttgtttcacctctacattgggtggggtacagcttcctaaatcacctgctgctttcaacagtaggcatactttcttgtcttaggataattctcaattaatagcagaaggcacaccagacttctgacataagagcaatgcctctaatctagagcagtgagccgagtattgttaaaaggatcaaacaagataattttttaaaaacctatgcaatacaaagaatgtatcacataattatcatatataatattctaactaaaatcaagatataattttatatgagtgatctcattcttgctgttttgttacctttttccactcggcaatgtatcatgaaacctcttcatgaaaatgaatacaggtcaactttactctttaatgactatgtagaatcctattcagattataccttaacgtatttagttagccaatctccttctaagttggtccaatttttcggcacgacaaaccaccccayagcaaacaactttgtacctacagccctgcatttacccaacttttttcttcaggaaagattcttaaaaatatacatttatggccgggcacggtggctcacgcctgtaatcccagcactttgggaggctgaggcaggtggatcacgaggtcaggagatcgagaccatcctggctaatacggtgaaaccccgtctctactaaaaacacaaaaatttagcctggcgtggtagcgggagcctgtaatcccagctattcaggagactgagacaggagaatggcctgaacctgggaggcggagattgcagtgagtcaagattgcgcctctgcactccagcctgggcaacagagcaagactccatctccaaaaaaaaaaaaaatatacacacacacacacacattatatatacatttataattttaaaatatactcccaaattgcccatgatagagatgtaagtttacacccccacatttacaatgtagcctatttgtccacaaactcacattatcgtctactaatacttttagctttaccaattaaacaggtaaaattattataaacttgctgttttacaattactaataaagtcaaatatcgttttcaattatggtaatttgtctttttcgcttgaatgcagtggtcatttccttttcttactgcagtatttctgttccttaattcttaaaaacaatttttaataatttactgaaatacttgtgactaaaataacagagagctacactaccttttagtaatcatttcttacctgtatcatcaagcctcattatgtcatctcgtaaattggttcctcctgtggttgccatcactttggcccctcccatgtgtttgctgacctggatgcaaatttgactgacctgtagagcaagttctctagtgggaacaatcaccattgctgaaacagtatcaaggaatatataagaaaatatggggtgaggtgggagaacatgctatacatcattatttacaaaatttaagaagctatagaaatactgcgccttatgatgcagtggctcacacctgtaactgcaccttatgatgcagtggctcacgcctgtaatcccagcactctgggaggccaaggtgggcagatcacctgaggtcaggagttcgagagcagcctgaccaacatggtgaaaccccatctgtactaaaaatacaaaaattatccaggcgtggtggcacgcacctgtagtcccacctactcaggaggctgaggcaggagaatcacttgaacccggaggcagaggctgcagtgaggcaagatcgcgccactgcactccagcctgggcgacagagtgagactcagtctcaaaagaaagaaagaaaaaaaaaaaggccaggcacggtggctcacacctacctataatcccagcactttgggaggccaaggtgggtggatcacctgaggccgggagtttgagaccagcctgaccctatctctactaaaaatacaaaattagctgggcgtgggtggcacatgcctgtaatcccagctacttgggaggctgaggcagaagaatcgcttgaacccgagaggcagagattgtggtgagccgagattgtgccactgcactccagtccaggcaacaagagcgaaactccgtctcaaataaaaaaaaagaaaagaaacactgccccttataatctagataccgagatgtattaaaaaattgggctgggcagcacagtgagtaactcatgcctagaatcccagcacttttggaggctgaggcaggaggatcgtttgagctcaggagtttaagaccagcctgggcaacatagcaagaccccatctctactaaaaaaaaaaatgaaaaaaattagctgggaatggtggcatgtgcctatagtctcagcttctggggaggctgaggcaggaggatcacatcagcctgggagattaagactgcattaagctatgatcatgacaccacactccagaatgggtgacacagcaagactctgtctcccccgccaaaaaaattaagaaataaaaataaaaagttgaatcattacacaggacattatgaaaactcaaatgtacaaatctctttatgaaaagagaacctattatagtgtcccagatttagactctccctcagcaatactattatataaatattaaactcttcctcttcttttttttgagatggagtcttgctctgttgtccaggctgaagtgcagtggctgccatctcggcccactgcaacctctgcctcccaggttcaagcaattctcctgcctcagcctactgagtaaccgccaccacacccagctaattttttgtatttttagtagagacggggtttcatcatgttggcccagctggtctcaaacccctgacctcaagcaatcctcctgccttggcctcccaaagtgctgggattacaggtgtgagtcactgcacctggccttctgctgctgctgcttcttcgttttgagacagagtctcgctctgttacccaggctggagtgcagtgacatgatcttggccgactgcaacctccacctcccaggttcaagcaattctcctgcctcagcctccttgagtagctgggactacaggcacatgtcaccacacccagctaatttttgtatttttagtagagacagggttttaccatgttagcgaggctggtcttgaactcctgacctcaggtgatctgccttgcctcggcctcccgaagtgctgggattacaggcgtgagccaccacacccagccaatactgttcttaattacaaactttcagcatgttgagttcgcaactattagctcaaagtttattaacaatatttctaaaagccccaactacatttgagtcagattcactgtgtaaaatacctaggtaggaaactcctgctacctaggctctatttacatcatatgaaagtgggaagaaaagataattacagatcacgaaagctaaaaatgtaaagtttcagagatgaaatcttaattccattaacttacattgaatataactatgaaaattttttattccccactgcctaggctcttaaaatcccaaaatccacagcctttaaacagaagttcatgtttctacaaggaattctgttaacactcatctgccacaagaaatagttccatagtttataagtagcaatgtcaactaatttaacttctcatgacctcagccgccttttttttttttttttttttttttgagttgagagtctcactctgtcacccaggctggagtgcagtggcacaatcttggctcactgcaacctccacctcctgggttccagtgactctcgtgcctcagacttctgagtagctgggattacagttgtgcgccaccatgcccagctaatttttgcatttttagtagagacagggtttcgcaatgttggccaggctggtcttaaatatctggcctcaggtgatccacccactttgacctcccaaagtgctgggattacaggctgtgaggcaccgtgcccagcctcagctttcctacctatagggcactaatacttatttttcctgtctcactggaatgctgtcacaagtgtgtatcatataagaatactcttaaaactagaaatctctaaaaagctgggaatcatttttaataaaaagaccatcatcaggctaaaaaaagaaaaaacctgaaaagaaagaatacaaattttagataatgtaaattctgactaaaaaaagagtatcttctacacatggctccaaggctgaaactcccatttttagtttaaaaacaaacttttattcaactaaccttgtatattgtccttcttcaggtctagccgttcaagtaagggaatgaggtaggcaccgctcttgcctgttccattttttgctctagctaagatatccctaccagataaagcaatgggaatgctctcctcctaaaagagataagacaatacaaaattacttctgaatgtagtacacaagcaaattcctctctgaaatacactgaaggatacctctttcggtattgctttaagtgtcctaagtatcctacatttgaattctacatgaatagcagagatccaagtaaatcagcacgaccagtcaacatcaacatcattataaaccagtatttaccagaactgctcacagaattttaaattggaacccaatgtcataagannnnnnnnnnnnnnnnnnnnnnnnnnnnnnnnnnnnnnnnnnnnnnnnnnnnnnnnnnnnnnnnnnnnnnnnnnnnnnnnnnnnnnnnnnnnnnnnnnnnnnnnnnnnnnnnnnnnnnnnnnnnnnnnnnnnnnnnnnnnnnnnnnnnnnnnnnnnnnnnnnnnnnnnnnnnnnnnnnnnnnnnnnnnnnnnnnnnnnnnnnnnnnnnnnnnnnnnnnnnnnnnnnnnnnnnnnnnnnnnnnnnnnnnnnnnnnnnnnnnnnnnnnnnnnnnnnnnnnnnnnnnnnnnnnnnnnnnnnnnnnnnnnnnnnnnnnnnnnnnnnnnnnnnnnnnnnnnnnnnnnnnnnnnnnnnnnnnnnnnnnnnnnnnnnnnnnnnnnnnnnnnnnnnnnnnnnnnnnnnnnnnnnnnnnnnnnnnnnnnnnnnnnnnnnnnnnnnnnnnnnnnnnnnnnnnnnnnnnnnnnnnnnnnnnnnnnnnnnnnnnnnnnnnnnnnnnnnnnnnnnnnnnnnnnnnnnnnnnnnnnnnnnnnnnnnnnnnnnnnnnnnnnnnnnnnnnnnnnnnnnnnnnnnnnnnnnnnnnnnnnnnnnnnnnnnnnnnnnnnnnnnnnnnnnnnnnnnnnnnnnnnnnnnnnnnnnnnnnnnnnnnnnnnnnnnnnnnnnnnnnnnnnnnnnnnnnnnnnnnnnnnnnnnnnnnnnnnnnnnnnnnnnnnnnnnnnnnnnnnnnnnnnnnnnnnnnnnnnnnnnnnnnnnnnnnnnnnnnnnnnnnnnnnnnnnnnnnnnnnnnnnnnnnnnnnnnnnnnnnnnnnnnnnnnnnnnnnnnnnnnnnnnnnnnnnnnnnnnnnnnnnnnnnnnnnnnnnnnnnnnnnnnnnnnnnnnnnnnnnnnnnnnnnnnnnnnnnnnnnnnnnnnnnnnnnnnnnnnnnnnnnnnnnnnnnnnnnnnnnnnnnnnnnnnnnnnnnnnnnnnnnnnnnnnnnnnnnnnnnnnnnnnnnnnnnnnnnnnnnnnnnnnnnnnnnnnnnnnnnnnnnnnnnnnnnnnnnnnnnnnnnnnnnnnnnnnnnnnnnnnnnnnnnnnnnnnnnnnnnnnnnnnnnnnnnnnnnnnnnnnnnnnnnnnnnnnnnnnnnnnnnnnnnnnnnnnnnnnnnnnnnnnnnnnnnnnnnnnnnnnnnnnnnnnnnnnnnnnnnnnnnnnnnnnnnnnnnnnnnnnnnnnnnnnnnnnnnnnnnnnnnnnnnnnnnnnnnnnnnnnnnnnnnnnnnnnnnnnnnnnnnnnnnnnnnnnnnnnnnnnnnnnnnnnnnnnnnnnnnnnnnnnnnnnnnnnnnnnnnnnnnnnnnnnnnnnnnnnnnnnnnnnnnnnnnnnnnnnnnnnnnnnnnnnnnnnnnnnnnnnnnnnnnnnnnnnnnnnnnnnnnnnnnnnnnnnnnnnnnnnnnnnnnnnnnnnnnnnnnnnnnnnnnnnnnnnnnnnnnnnnnnnnnnnnnnnnnnnnnnnnnnnnnnnnnnnnnnnnnnnnnnnnnnnnnnnnnnnnnnnnnnnnnnnnnnnnnnnnnnnnnnnnnnnnnnnnnnnnnnnnnnnnnnnnnnnnnnnnnnnnnnnnnnnnnnnnnnnnnnnnnnnnnnnnnnnnnnnnnnnnnnnnnnnnnnnnnnnnnnnnnnnnnnnnnnnnnnnnnnnnnnnnnnnnnnnnnnnnnnnnnnnnnnnnnnnnnnnnnnnnnnnnnnnnnnnnnnnnnnnnnnnnnnnnnnnnnnnnnnnnnnnnnnnnnnnnnnnnnnnnnnnnnnnnnnnnnnnnnnnnnnnnnnnnnnnnnnnnnnnnnnnnnnnnnnnnnnnnnnnnnnnnnnnnnnnnnnnnnnnnnnnnnnnnnnnnnnnnnnnnnnnnnnnnnnnnnnnnnnnnnnnnnnnnnnnnnnnnnnnnnnnnnnnnnnnnnnnnnnnnnnnnnnnnnnnnnnnnnnnnnnnnnnnnnnnnnnnnnnnnnnnnnnnnnn

SEQ ID NO: 96766 - DNA, 14796 bp, Homo sapiens
ttctgcctcagcctcccaagcgtgtgctaccacgcccggctaattttgtatttttagtagagatggggtttctccatgttagtaaggctggtctctaactcctgacctcaggttatctgccctcctcggcctcccaaagtgctgggattacaggcgtgagccactgcgcctagcgggctacttatattttctattgcaatgtaaattgatgcaactctgttaaggtgaaatagtgtctgttctcgtgccactgaaagccatccccaggtcggcttgcagtacaagatccttacttggggagacactggggccatcccctcacagatagagactgaatgcctcctgtgtggggggcacccaaaggggtcctctagccccagatgcagggccacatcaccctgttcccaaagtcagtcctctcctataaagcgcactttcctcccagcctccgccaggaccttccccacaagtgaccatgcctcccctcctacctgcacacatacaggcatattctgaggacgttaagccgaccagatggggcagagctcagctttggggttgactgagtttaatcccaactcaaccttgtccagccggcgactctcggtggctcagtttggccatctataaatggagatgtgaataatccctgcctctcaggcctgtcctgtgactctgaggaggtaatgcagggaaggagcggtgcagcggcctaggtgctcacagagtgcccaggaagccaaggcagccgggcaagtgtgggagaagatggcccatggctgggtatcatcaacagttcccattccagccgttgtctcaaatcaactacctgttgctctgtggtaaaagcagagtgtgattcttgtcaaatccagttctgctcaaagtcaaagtcatcttttttttttttttttttttttttgataggagtcttgctctgttgcccaggctggagtgcagtggtgcaatctcggctcactgcagcctccgcctcccaggttcaagcgattctcctgcctcatcctctcaagtagctaagattacaggcatgtgccaccacatacggctaatttttgtacttttggcagagatggggtttcaccatattggccaggctggtctccaacttctgacctcaggtgatctgcccgcctcggcctcccaaagggctgggatcataggtgtgagccacagcacccagccaggatgaatttcacaaacattatgttaaaccgtagaagcaagagccagaagcacataccgtataatcccaagtataaagcagtccggaggcttggttgtgactctatggtgataggagtcagaaaagtagtcagcaatgtgctatctgctattgactggataggaacaagagggaacttcctggggtgttggaaatactttatactttggtctgggttatgtttacacaagcatatacatatgtaaaaaaatctgctgggtgcggcagctcacgcctgtaatcctagccctttgggaggccaagacaggaggatcactggaggccaggagttggagaccagcctggccaacatagtgggactccgtctctacaaaaaatttaaattaaaaaaaaaattaggcgtagtggcacacacctctggtcccaaatactttggaggcttaggtaggagcatcacatgagcctaggaggtcaaggatacagtgagctgtgataaggctacagtgagctgtgatctagccactccactccagcctgggggacagagcaagaccctgtcgcaaaatatatatatacatgtaaaaatgtaaaacttccggccgggcgccatggctcacgcctgtaatcccagcactttgggagaccaaggtgggcggatcacgagatcaagagatcaagaccatcctggctaacacggtgaaaccccgtctctactaaaaaatacaaaaaaattagccaggcgtggtggccggcgcctgtagtcccagctactcaggaggctgaggcagaagaatggcgtgaacccgggaggcggagcttgcagtgagccgagatcgcgccactgcactccagcctgggcaacagagcaagagactccgtctcaaaaaataataattaaaaaaataaaaggccgggcgcggtggctcacgcctgtaatccaagcactttgggaggccgaggcgggcggatcacgaggtcaggagatcgagaccatcctggctaacacggagaaaccccgtctctactaaaaatacaaaaaattagccgggcgtggtgccatgcgcctgtagtcccagctactcgggaggctgaggcaggagaatggcgtgaacccgggaggcggagcttgcagtgagccgagatggcgccaccgcactccagcctgggcgacagagcgagactccgtctcaaaaagtaaataaataagtaaataaaataataataaatgtaaaacttccatcgagctgcacggttttcatgccctttactgtaatgttttgcctcaattaaatacctaataattgatgacgatgacggcgagcaatcactgagtaccaggttctagacagtgtccttagaccctaatcccccagcctggtaatggctggttcgtgttacctccaaggaaccgggaacgcgtttttgcaaaggactgaggcgcgtactcacgcctgccggggaaggagccccgggctggctcgcgggactggccggtaagcgacccacgtggtggccccgtgtcccgagcgcgtccacggcacagaggcacgggcacggccgacgaaggtgccccggccccctcccgcggcgctcctgcgagagccccgcccatgcccgcgggagagaccggccaatggacagccggcctggcccgggtcactccgtgaagggcctcgtcacctaggctgaccactcgcttccaatgggtgagcggcccgcggcagcccgggaacagcggccttgcgcctgcgctgctctcccctctggcgcatttccgcagcgagcgcttcactccgaatgccggttggagccctgccagccaatcaccggggcgtcccaaggccggtagccaatgatcgcccctctccccgcgccgggcctcaccgattggcgctgagctcccgcagcccgcgggaggcgggggcggattggcgaaggtgcaggccaatgggcggcgggcgcgaggcgctgggccaatgagcgccccgggggcggggagggcgccgcggcgggcggctgcgaggagcggccggcgggcggcggcggccggcgggcggcgatggcggcggcggaggccggtggcgacgacgcccgctgcgtgcggctgagcgccgagcgggcacaggcgctgctggccgacgtggacacgctgctgttcgactgcgacggcgtgctgtggcgcggggagaccgccgtgcctggcgcgcccgaggccctgcgggcgctgcgagcccgcggcaagcgcctgggcttcatcaccaacaacagcagcaagacccgcgctgcctacgccgagaagctgcggcgcctgggcttcggcggccccgcggggcccggcgccagcctggaggtcttcggcacggcctactgcaccgcgctctacctgcgccagcgcctggccggcgcccccgcgcccaaggcctacgtgctgggcagcccagccctggccgcggagctggaggccgtgggcgtcgccagcgtgggcgtggggcccgagccactgcagggcgagggtcccggcgactggctgcacgcgccgctggagcccgacgtgcgcgcggtggtggtgggctttgacccgcacttcagctacatgaagctcaccaaggccctgcgctacctgcagcagcccggctgcctgctcgtgggcaccaacatggacaaccggcttccgcttgagaacggccgcttcatcgcgggtccgtgcgccctggggcgggaggctggggggcgggcggcgggccccctccctgccctttgacccggtcccctgtgccccgcaggtaccgggtgtctggtccgagccgtggagatggccgcccagcgccaggccgacatcatcgggaagcccagccgcttcattttcgactgcgtgtcccaggaatacggcatcaaccccgagcgcaccgtcatggtgggagaccgcctggacacagacatcctcctaggcgccacctgtggcctgaagaccatcctgaccctcaccggagtctccactctaggggatgtgaagaataatcaggaaagtgactgcgtgtctaagaagaaaatggtccctgacttctatgttgacagcatagccgaccttttgcctgcccttcaaggttaaagattgagtgtctttaatctgcagaataaaaaaaaagaaattgaaaaccagttacccaaattaataggtggggcttaagcatctgctcggctaagtggcttcaaagagtgtaattggagttaagcaaaggcattcattgttaaccttgtaagtacacgtttgggggacgattttgtttacagatgcttgtaatcgaagatgcacttttaggcttggaaggcattgtgggctgggttctgggccttgggtggggttggcaggggcaggctctgcacctgtccgggattcaggtaaccagggcctgccgatgggactgaggcgggtctaggggtgtgtgtcctgtattttattgaaaaactcattcagggatccagcccctcagggggcagagggactgattattctgactgttgggagaggcttgcatggaccagagccccatcagtatgactgaaagtccagcggagccttctgtgtccctgtgcctcccagcagggtgggagtggaggaggcggctgctcccaggtggcatctccctgcccttgggtgcaaagtgctgccctcaccactctcccacctcccttacttccttgaaaaccactctgatgtcacaactgagtgtctgttccgtttcagatacccagggctgctgcccagttctgtaaacgcagcccagctaaagctctgctgtctcaagtgtgcatttatacccaggtgatttggacggagcagctaccatggcgtggacgccttcactgaactccgggctgcagtgcagggagctcagagcagtgctgctaccaaacagtttttaactttgaacaactgtgtcaggcaatggatttgaattttaagtgtattaatagctgtgctctgtgtcgtaggcaaaattccactgaaggagcctctgtgccctgcagccggcagcgcggctgaagcatgtgttggccaaggaatgcctgtcatccaggtgccctgcagccagcagcgcggctcaagcatgtgttggccaaggaatgcctgtcagtcatccagggctctgggaggggacgagagttatgtccccaagaacaggaagtcctttacaaagcatccagtctcttcctgtcctccccttccctaggctggggtaggggttagagactggtggcccaggaggtcacctgccttgccctggattccctcttcagtggccagcaggacttggcagggccaccagctcgccaaggttctgggcggggctccagcctctcctgcctgctccttggctctgctgacctttcacaggcctgacagcagactcagcagggccatcccgggatgctgcaccttctggctggctccctaccagcgcctttccctgtacctggcagcttctctcttggccccacagtcacagcactccacttggtcacaaagacttcagagcaataagaggcgtcctgagccttcagcacctcccaggcctgggatatcgggttcagagggtgctgcagagcagcatgagggtggctccacccatgaggctggtgacactgacgctggcttggctaagttggctcaagccgggtctggcctgacagggtgcagtcacaccaggagcgcatggcagatgcagcctcagtgatgcctctcttgccgggtaggggctgggagtccccgtgcaccctgtctctggcccatgaggggctgcagcactgtgggcgccagagcacagattaaactctcaaacccacactggctcaggtgtccttgctctcaccttgcattggcccgggtgatgccgtctcaccacgggtgggaggactcaaagtagatgggtaactggggttccaactccagagctggaatgccaactgcccactcccagcctggttcagaggaagatgttttgaagaatgagggaaagccaggcacaaagggaagccagggaagcaaagggccctggagtgaagctggtgggctgccgtgtcagagcgcccagggcagggagcagagctcagaagtaatgctggcccrggcgcagtggctcacacccgtaatcccaacrctttggaaggctgaggcaggtggatyacttgagatcaggagttcaagaccagcctggccaaaatggtgaaaacccatctctactaaaaatacaaaaattascgggacttggtggcatgtatctgtaatcccagctactagggaggctgaggcatgagaattgtgtgaacccgggaggcagaggttgcagtgagctgagatcacgccactgmactccagcctgggggacacagcgagactccgtctcaaaaaaaaaaaagttgggctaggcgggcccccgaggctggcctgactgtcccaggggcacaggctccagcaggctgcctgtctgtggtccaggcttcrggaacccccyggtcttgggtgtgcgggggctgggaagtggctgggggtgcacagtcccacacctgtcattcactgaacaggcacgtattgacagcttgtggcgtgtcaggccctgtgcccaactctgggagtcaaggataacctgacagactcaggccactttaggaaaacgaaatccaccccaaccacasttagcgagtcaccctggccgggcctgggctgccctccagtcggtcagccggactggatttccaygcggccgagccctacgcctcccagaccctgagctccagtctgcacaggccaggtgtctggagccgggcctggtgacaggcatcccccaggtgggaggaggggctgtcctggctctgacctggatatcagatccagagctgagggggaggygcagggtcaggaggggaggggttctgttctgagtttcccctggccaaggctgcagacaagggacgcagacaatcggcacattgtgagcaggggctgcaggatggaaccagcaagctgctgtgctgagcgccccaaacctgggcctacaggggtgagtgcctcccgttactcctgcagcaaggacccagggggtgccccaggccacccagcccctcccttccccagcccacttgctccctgatgtctaaccctcatgacccttctgaccctgatgcacgcccaggtgaagaccaagccctcctgcgggggctggagagccgtgrgcctgctcctgctgctgctgctgctggtgctggccgctgtggggrttgtggctggagggcttcttggctctgctcagggccctcccaaggtgagcccctcctcagcaccagggacatggacagtggaaagggagaagggaagctggcatatcccagcctccagcagagcaagggtgcggagcaggcagtgacaccacctaggagcagacagccagaggaccaaggggtggaagggcccactcaggggtgtcaggagtcctgcagcccagagctggaggctgtgctggggttgcacagctgcccggctgaactccaactcccactgccagccaaggctgcagacgctgcgaatgaccctcccgagcccccacatgccccggcccaaccaaaccatcctggtggacgtggcccggaacgcggcgaccatcacagtgaccccacctcagagcaaccacagctgggcggtgctgttcgacgggcagagcgtgagtgggcagggaggggtcaccctggcaggtgtcggtctggggggccccgcctcacccccctgcctccccagggctgcatctgttaccgccctgaggagcaccaggtctgcttcctccgcctgatggaggacagtgatcgggagaccctgcggctgctggtggatacctccaaggtgagccgtcctgctgggcgcaggcccgggccaggggctagacaaagggtcctgtgtgcagcccagtacgggacaggctggagctstggtttcagggaacaggaagctctctccgccctaagcccaggctgctgacaagagctgagggtggggacatcactgggggttggagggtacccggcccygccaagccaggagcagggagcagccctgtcccaccgcccaccagagccttctcaacaggtccaagaggcttgggtccccagccaggacacccaccacacccaggagctgctggcagtgcaggggagcctcgaagtggaccccgcccaggcgggggctttggtgcagcgcctgtgcatgaggacccccatctactgggcccggcgagcagagggtgagtcaggaccgctgtgggggaaggccaggccctcgggatggtttgaggagctgggggcggagcccttggagattcacggcaccctcgccacagggccccggagacagcggctgatttatctctgcatcgacatctgcttcccgagcaacatctgcgtstcggtctgcttttattacctcccagactgagcccccgacctggcccagcctggcccgtccccaatccagtgggctggccaggccacctgcaccagggaggacagctgctggcagggactaataaacccttccacctggccatggtggtggtgttctctatggaccgaggccctgaaacgcgggcagggaggggcagagaacacactagcttgggggtgggcaccagcctcagacccctcagcagctttgggccctcggccgactttcccaggcagtgcaggctagcccagtccaggagtgtgcagcctggcttgggtcgagctctgtcacatctggataagcaactgggggctgagagtcccagggcagcctggcccagcaggtcaaggcgccacagggggccatcaggtccagctggcgcaggccggcaggggagggtctgctctgacctgggtgctgcatgggtccctccagctgccaccacctgcaccaggcagtcccgaggggtcacaggctagcccagcacactgtcattgaaggccaggcagacaacagccttctggtggccgccatactctctcttgatctctccagtctccacacaccagagccgggccaggttgtccgaggaagctggagggggagattgtgcagggctaagagcgcaggtgcaggccaagcaggcggccccagcagaggggaagctgcagccgaggtgggctggctctggaggccagcgccgggggccagggatgggggaggccagggcggggctcaccagtgacgatgtactgggagtcccccgagaaggcgcagccccacatccagccgcgggaggactccccggggttgccgctcttgatgctcagctccgtcatcagggagaagttggacgtcctccagatcttgcacgtctgatcagccgagcaggtggcgaggagcctagtgggtgggcatggggcgtgtccagcagcagccactccatccagcagcccctcccctctccagcccccagcccaggcaggtcccctcccgggccagcaggccctgcacgcacgtggagtcggggctgaagcgacactgcagggcgtagcgcgtgtgggcagggatcttagtcttggggatgagctgggtcacctcgtcaccaatgccccccgtcagattccagacatagcagtttccctagaggtcaggaggaccgtcacggagggcccaaggcctcaggtctgagacacagggaaggatgccctgggggccaacactgggggccaactgtgcatggggaccccgggtgaggggcaggcaggcccctctggtcctgcctgcagaaggcacctgggaagcctggccccaagcaagggccacacctggcaagccaagaacaggaggccacgcctggccaaggactcaaattctccttcctggaggatgccgatggccaacggaagtagacaggagaagggcaccagctagagagacagcatgacaaaggccagcagaagggaaatccgggggcaagaggtacaagtgatgcactgggattaaatgaagttaatgaaaaaaaatgaggctggagagaagagcaggggccacgccacagcagcctacgggcgaggccagcagccccgggtctcctcaggggaatgacgccacctggctgatactgaccaggcaccactagaagcatccaagagagaacgtgtcaggggccaggggaggtcagggagggggaaaggaagcctcagagagtgtgtcagccgtcaccagaaacaagggtgactgggaccaggaggcaacagagtgaaaagagggaagtggatcgacttgggagagactccagaaagcggagtgaccgacctgcagacaggactaagccatcgggagcgacactaaggcttctggctttgctggcaaggtgggtgttagtgcccgggatggggaaagcaggagggggccgctaagggacatccaggaataagcccacctgcagaggctgagggctgagtgccaagctgcccgcacccagcacctgccaccaggactcacggtgctattgacagctgccatgtagctggcgtcgggatcgatgtgggcggacgtgatggagacctcgggctcagggatcagctgctcgttgtggtctgttttcaagtcccagatgtggatagccccgctctggtcacccacgatgagctctgcctggggtgcaggggtggtgaggcagggcccaagcccagccctccaaagtcccagggtgcctggccccatgagcacccctcacctggttggggtgcaggcacacgcagttaatgggtgcgttcacctggaagatccgctggcactgcaggttccgggacctgcgggccgggccggggcacatgctgtccatctgggcttgttggtgccctacccagatggcctcggcctggccattcctcccctccctctgctgaaggacctgcctcttgggaaatacttgggacgcagggccctctgctccagcagggagcctaagccagtggctggtggaaggggaataacaagctggctccgggctcaaggcaggactcgcgctctgatgcaattcactctcctcctgtcctcacttctctcagtaagtcgcccacaggaagctccctgtctcagcctctgcttgaagagaacccaacctaaaacggtctcccagagcagcccaccccagccccgggcagcacgccccctccccaccgcacctgaggtcccagatcctggctgtgcagtcctcgccgcccgtgtacatccagcggccgtcttcgtggaagcccacagacgcgatgttcttgttgacgccgtcgtagctgatgatggggttagggttattggagttgagatcatacatgcggatgtgctggtaacctagggacacaggctgaactgaagcttggctgtgctgaggtcgacccaccagagctcaggagtttagagatcaaggatcacagatacctgcagcagcaatcatgctgcggtccggtgtgacctccaaggcattcacctgctgggactgttaaggaggatgacgggaaggtagccctgaggccagggccccccaggcctccaccatctggccttcacacaggctgtggtccccacacgaggcatccccccagcgccgccctgcccgccccgggtggaggatacggagtcctggtgctgcaccgtccgggtgcagatgccgctgtgggcctgccagaagcgcacggtgtggtcgtagcctgcagtggccaggatgaccgggtcactgcccaccgtgcctggggaggtgttcatggtgtggcctgcacgggccctagagctgaacggcaggggtcaaaggtcagagcatctgcagagaaggatgtgaagtacttagaagacactctctgtgctaagtagattatagacccacaaggcgctgccgaatggcgcttatcattcccattttagagttgggacaagaagcgcaggtaggttcagggacacgcgtcacacgcgtgatacctggctccggggctccagggcgcgtgctccatccccgccccacgcacacggcgggggcgccgtccccccccacctccgcagccggcaggggggagtcacgcgcgggcgccactctgccgcaggggcgggctgcgcgtgcgcaaggcggcggatgggccggggaaagccgagcgctgcggctgcgcatgcgtagcaggccagcggcaggccctgatgggaaagggcgcagtctggctggacccccgagctcccctttcctccggtgaccgcccttgctccgtcctgctggccggcttcccctggccgtgctctcccagccacccagcagccggttcccggcccctggctcgcggcctccgtaccttacgggcggctccgcactccgccgtgtccaggacggcgaggggagccggagcgagtcgatcgaggccgagcgtagagttatcgatggctccctagggcgagaccatggcgcgggcgggggtgggtgggacgagaccaaagttctggggcggggggttcccgccgggaggaactcggagcggtccccgtgcgcggccgcgggcccggcgcgaggtggaaggaagctgcggctttctctccggcctcctgcccactggcacctgcccttctgacacggctgtccgtttcccgggctgtcgggtcgcgctgttccggtgccctccctgacccactactgcgccacgctgggctaggattggctgaaaattacaggacttgaattcagacaagtaacgaataattttttttttagtgtaagtatatccaggacattgcatgggaaatacttatgctaaaaaaattttattgggtatcctgtagttttacttgctagatctggcaccccagccccagcctgaccctcaggacatcccactgagcccagggtccccctcaaaaccacaggccctcattccagctctgtgagctccacgccggtgccctcacccttgagacaggctgtcgcatggttttttcctgctgctcttacagacctggctgcaccccttcctctggccgcagagggggtgcatcttgtcccttgaccaggccatagttcccatggagccttccttcctataccttcacctcctctccttcctgccggttagcctttaaaaaaacaccataaaacaatcccaaattatcttcttcaaagagcggtcctcaccatttttctagttccacgtcctcacctcccactcattccgcaaccccagtcatctgccttttacccccagctctctagctctccagtggaaattcctcaaggtcactgacaatctcactttgctaaatccagtggatacttttccttcttcccaccttttttttttttttctctcgagacagagtctcgctttctcgcccaggctggagtgcagtggtgcaatctcgactcactgcaaaacctctgcctcccaggttcaagcgattttcctgcctcagcctcccgagtagctgggattacaggcacgcaccaccacacctggctgatttttgtatttttagtggagacgggatttcaccatgttcgcaaggctggtctcaaactcctgacctcaagtgatccgcctacctcagcctcccaaagtgctgggattacaggcgtgagccactgcgcccggcctcttcccacttcttctttctttttttttttttttttattgagacggagtctcgctttgttgccaggctggagtgcagtggtgcgatctcggctctccacaatctccacctcccgggttcaagctattctcctgcctcagcctcccgggtagctgggattacaggtgcatgccaccacacccagttaatttttctatttttagtagagacagacttttcaccatgttggccaggatggtggatggtcttgatctcgtgacctcgtgatccgcccccctcagcctcccaaagtgctgggattacaggcgtgagccactgcgcccggccccctcccacttcttgacgcatctgagccatggttgacggcaccatgcctgaaaggctgccttctcctagctcctgtccccgacatttagtctctttccctgcctgcccgcaaggactcaggcccttcagcattcactctgtgcaccccacgagataccagggggctgatgactgctagctctggagcttccaatgctgtccctgtcctgggccccttccaccctgtctccagctctgatggcctcagctccctgttaagacactgtcccttgaatgccccgcagggtccaccatattccagggccaagacaacccatccctgagtagctccccttctgtgggcagtgcccaccttgtattacagctgggcaagatccgacacctcccctccctcacccttcccttcccttcagccaccgattttacctgtgatataccttcctgtcctttccactgccctggttctagctcaccacccccatcccccataaaagcctccttccttgccccagccactctggcccccttccaaactgtccaccacagtgcagaatggccttttatttatttatttatttatttatttatttatttatttatttttgagacggattttcactcttgttgcccaggctggagtgcaatggcg

SEQ ID NO: 96767 - DNA, 12546 bp, Homo sapiens
ggtgccttctccctatgagccgcctaagggcaagccctgcctcctggtctgctccctgccctcccccagacaggctcccaagttaactggcaccagccagtccatgaggggcccttgtagagagcggggcccagagaagtctgtagggactaggcaatccaggaaagcttcctggaggagtagggtgtttggaatcgcgtgctatttgttcactttgtcgtgtgcgctctaacggcctgtgttctccatcacagtttatcttattccctgctgcactcagcacagtgcctggcgcgcagtgggaaccgaatgaccccctcctattccttatgtcagttgccttttgtctgtttctttcatcgtaagcaggaatctgtccggttcgcggctgcttcccaggcgcccagaccagcgaccagcaccgcgtaggcgctcggcacagaccgagaacggaggccccacgcgggggcgccctgcggcgaggcgggtcccggccgcgcccggcggagccggggaactacaagtcccatggtgcatcgcggcgccagcgcgcagacgcagccgccctcggcgtcctctgtagcgggcgacctaggccgcgggacccggacggaggtagaggccagggcagcgcgtccgggagcggagtccgcgcccgccgccgccatgccggacagctgggacaaggatgtgtaccctgagcccccgcgccgcacgccggtgcagcccaatcccatcgtctacatgatgaaagcgttcgacctcatcgtggaccgacccgtgaccctcgtgagaggtacgaagccccagcccggggctccctcgccggcctctggggacccctggatcccacaccctgcctggatcctccaatgcctccggggtcccgtctgcctgagaccgccccccgctgcaccccggggacaactccccacccccggagacctccgagctccgtcgcctcctttggcctcccactgcaccccggacctcacctcccaggatcccttactctcccctgcaccccgggatgccccgcttcttcccaggactcttccctccctgccgcacccagcgcccactgccccaggaccccgcactgctctccgccccccgccgccccgggcacccctccactgcaccgctggcctcaggcctctctcaaatgtctctctgccagatgaccaagtgtcggggtgatggccgagatgcccaaattcaccatctctggaacgaaccgggaaaatgcccagttcagtttttgttgttttttttttttcctgagacagtctcactctgttgcccaggctggagtgcagtggcgcgatctcggctcactgcaacctctgccccaccccgggttcaagcgattctcctgcctcagcctccccagtactaggattacaggcgcaccaccaccacgcccagctaatttttatatttttagtagacacggggtttcaccatgttggccaggctggtctcgaactcctgacctcaggtgatcctcccaccttggcccccaggtgctgggattacaggcctgagccaccgtgtccagcctggttcagttctttttgaacacttggggtgcatagcatgctctggtggttcttccgtaagagggtgaagtctccaaatcaaacccccaaagatctggaaaccgtgcaacagcggacccagctccctctcttttgtagcagttgtagagcatgtctgtcctatgtgtctggatgttcgagctctccttttagctcgttcatttcccagtgaggaagctgaggccgtaaggtggtaagttctgcttgctggaggctccctgttggagcctctttgcgcacccagcagggtccctgtgcagctgggggaggtgcactggcagagctgcgtcccagtccttgccatctgtgagaagcagctgcctgtaggcttgtgtgggggacagagtaaggtaatgcatgtggaactctgaggatgatgcctggtactcgggagctctccatcagctgtagcctaggccttcacaggcctgcctggctggccacatcccttagagagacgaattgctgttttctaaacgctggaacactcaggaagttctcctctctcccctccaaagggcttatgagaaataagaaagctaaaagcctgtccaaaccgatgaggcgtttgagtctgtggctttgtctttgcagaatttatagagcggcagcacgcaaagaacaggtattactactaccaccggcagtaccgccgcgtgccagacatcactgagtgcaaggaggaggacatcatgtgcatgtatgaagccgaaatgcagtggaagagggactagtacgtgagccatgctgggagtgtggagatctgcaccgtgtgctgctgggacactagtccctgggatgccacagggtggcatgcccagattttaggggtgacatgggaggagccagaccccagggctcttgctttcaattgttctcacagggtacaggaaaaggattccttgtgattagcctctcttgctccttttctccaccagcaaagtcgaccaagaaattatcaacattatgcaggatcggctcaaagcctgtcagcagagggaaggacagaactaccagcagaactgtatcaaggaagtggagcagttcacccaggtggccaaggcctaccaggaccgctgtgcgtgccccacccacccccaaccccccaccatcctcctgaggcctgggggccagaaccattgcaaatcttccctcccctcccttgtgctcacttgactttgccccctttgcatgtagcagaggcctcggttcccagcttgtttccattgcttccccagatcaggacctgggggcctacagttctgccaggaagtgcctggccaaacagaggcagaggatgctgcaagagagaaaagctgcaaaagaggccgccgctgccacctcctgaggcagctgtgggtgcccctgctgtgtggctctgtatgactgttgctgaaatataaagccctgcaacctgcctgtgtgtctggtgtgatctattggccccacgccccagattcaaaccaccactaaccatgcaggacacgggaaaaaaacagtaacacgcttaattcactttatttttcttgtataaaaaccctatgttgtagccacagctggagcctgagtccgctgcacggagactctggtgtgggtcttgacgaggtggtcagtgaactcctgatagggagacttggtgaatacagtctccttccagaggtcgggggtcaggtagctgtaggtcttagaaatggcatcaaaggtggccttggctgcaaaacaaaagaaccccaggagggtcagtggtgtgcttgaggcaagtcccccaacccaaaaattgtcgcactcctaggaacagagaggccattctgggcgggtctgtcgtgcattaggagagcctttctctgcctccctgaaaacacgccaagcacacactggacccgtgtggttaagcggagctgagagaccatggctatgccccatgtgtggaccacctaccgaagttgcccagggtggcagtgcagccccgggctgaggtgtagcagtcatcgataccagccatcatgagcagcttcttaggcacaggtgcggagacgatgccagtgcccctgggtgcagggatgaggcgtaccagcacagagccgcagcggcctgtcacctggtgagggaaggagtcaggagacgggggcccgagggagcctgccccacggcaggcccatcacctgccaccagcctaccttgcaagggacagtgtggggcttgccgatcttgttcccccagtagcctctgcgcacggggacgatggagagcttggccaggatgatggccccacggatggcggtggccacctccttggagcacttaacacccagaccgacgtggccattgtagtccccgatagcaacaaatgcctgcgaaaagatgtgtgtgaggcagctggtggccctacacccaatcactgcccaccgcccagggcctgttgcacccctcaaggaaagagaggccacagtaaggcccatccgaggtcctgaggagatcttttctctctctccccgttacgaaagtcacacgggtgaagccaagtgcaactatgcagagccgagagagtcccggcaagcccagcgcagccccctccaggacagccgggtaccttgaacctggtgcgctggccggcacgggtctgcttctgcactggcataatcttcaaaacctcatccttgagagaggcccccaggaagaaatcaatgatctctgattcctgaaacaaacaagaaaattgtagggagagcattaaaaaaaaacttaataccattacgatattcaagaaccaaagtcacggccgggggcggtggctcaagcctgtaatcccagcactttgggagactgaggtgggcggatcacaaggtcaggagtccgataccagcctggccacatggtgaaaccccacctctattaaagacacaaaaaattagccgggcatggtggagtgcgcctgtaaccccagctattcaggaggctgaggcaggagaatcgcttgaacctgggaggtggaggttgcagtgagccgagatcacgccagcctaggcgatagggcgaaactgtgtaaccgcccaccccgcccaaaaaaaaccgaagaagtcatgaaccccctcacctggcttccccccgatctgtccccttcgtttcgtttttggaagcttgtatgtaaggttaccctatttctgcatctcaatcgtttcttcctatttgccctttttctcttgtttggtgagatgtggctttccactcagatttccttttgctttgtccagctttggcctagccatgaccaccgtaccttgctagggcgaacgctcacatgacaaatatgccattagcctttccccactgcacccgctggatgcagatgacagctgtcccgtacacgcggactatgacagtttgctaacccttacagtgtcctcccacaacctgaacttcatcatcctctcggatggcatgaaccaagcgctgcttctctttcagttctttggaaatgaattcgctgcgaatgtgggaagatgcgctgaaatgccttttgtggctctggcttcgctcaggtatccatccaacctctaagtggaatcctctcctcagccagcccgcaacacaacctcaacctctcacgcgagacgctgggccctttaatgcgagtcaatggcagatgctaatcctccaaccccagcccaaatgactccggggtcgcacttgctcaacgccccaacgaccgacgcgtaccttaatgggcagggagaagagatagatctcctccagggacttgatcttcatgtccttgaccaagcggcccaacttggtgacgggcatccactaaagggagaaaaggcgccagtgaccaggaccgctctccggcgccgcccaggggccggaccccgagcgtggctgatacctacctccttatcctcggccttgcctccgcgagctccgcggcctcggccccggccccgtccacggccgcgaccccggccccggatgccactgccgaaacctccgcggaagccaccgcggttccccatcccagggccaccagggcccccgggcccccccgctgcaccggcgtcatccgccatttgctgggaaaagcgacaagaaggaactagtcagtgtggcctacgcatctggcagccccccgcgagacccagacaagggctcccgcccaggagcgcggactcgggagcctagacccgacccgatgtccgcggattcccgccgcccacgcagaggcccgctgcagcgaccaacaggactcacgtgttttgtcggaaaagaagaacgagacctactgggaagcagcttttatagcacgccaagcgccgcgagatctccgcagccccgccccaagcgggagcgggccgagctcctataagacaacctgtgattggctccgcggtgccccgtcctcaccgggctctgagtgctcttkcccgtccggccccagccgcggcycgggaatctacgtcacccgaaaagcgactataaacgccggcgcctccgtccccagccgcggctcgggaatccacccgaagagtggctataaacgtccgcgcctccattgcgctctcctyttcacttaggtaggtcctgccgcgttgaccactggcgtctcgctggtggtcttcgagaccggcgttggttgaaaatcgcccccggctttggccgtggccgcgggtgagattcggcgcccagagcccccgggggcctcagctcaccgcgcgctgccccatgtgcggcggtgaaacccaggccccgacaggcgctgccgcctcccccccgggtgcggtcgctcgcgaggtctggcccctgactcctgaccccgactgcagacccctaaccttgttctttctccgcaggacactggtcctcccacgcctgacaycgacgtcgccaggaccgcggggttgggggaacttggctgtcccaygtctttcaaataaagctgttttgtctaactcactgcatgcgggtgttcttggggccccgactcgcctatcagcctggcaagtgcatatgttcacgctgtggcggggagaaccctagcgagatgcctcctcttctttcctggctttggacacaagggtaggatatgggaggttggcaggtgatgtgtaaggtccgacgcctcttaagtggaggagccagactacgaacagtcttgtggccatgcgcatctcaagtgaactacactggcaggtaaaatgccttggtccaaagggctccaggtggagccagcagagcactagcaaggatgggaagctcagaggcttccagtggcttccttgtgagaccaggtgagattctaaaggatttgaccaactaggcctagatgaactcagcgcccccgtggtgctaggctggagtggatcagacacctggtttgggaggctgggccccctgctctggggcggcaggttacccgggagtttagttgtcactgccgtggagctagcacctgagtatcagatcctaagtgaagacccccagtgagtcaatgcctaaaacccctaagccttaggatctccagccacctgggccgcagtattggagagaagagggtggcaatccctgtgatcccactgaagccctggcctgggggagacagctccatgaagcttggttctgacccagtgcttctggggaaacgctgtcagccactctcaagccccaggcgcttcatagacctatctcaggtcaagagctgctctcttttatttttattttattttatttatttttttgagacggagtctcgctgtcacccaggctggagtgcagtgacaccatctcagcttactacaacttccgcctcccgggttcaagcaattctgcctcagcctcccaagtagctgggactacaagcaactgccaccacacttggctaattttcttgtatttttagtagcgatggggtttcaccatgttggccaggctggttcgaactcctgaccttaagtgatctgcctgcctcggcctcccaaagtgttaggcttacaggcatgagccactgcagctagccgtatggctttttttttttttaagaggtggggtctcactgagttgcccaggctggtctcctgggctcaagtgatcctcctgccttggcctcccaaactgctgggattacaggtgtgagccaccgcgcctggctacctgtgatccttcagagaagggggcaagggctgggctgtacggggtctctgggtcctgaaccagggttgtgactggcttgagctggacaatgctattgtgatgtcagcccacacccactgtgaaatgcaggctcctgagctctgggggcctgtggagctgctgtctagacgcagatcatggtgagcctggggccctcttgcttccagccctgagatgtgtgcccaactccagaaacctgcccagttgtccagggatcgaccccactccactcggaaagggtgggcaatgggttgcagacccccatatggtacaaggaaaccttctggaaggctctggctaggtctaattccaggctaaggcccccgtctccagccagagattagtagtcctggggtggggggccctaacccccacagctgccccctcaaagtgggcgctgagccaacccctttacttgaagttctgtggcccacctccctgccaaaagcttgctgggctctcttgctcggtatgtggaccagggactggatcactgtcccagccaggtgctgacacctggcctttgcagggtggcgggtatgatctcaacctcttcgccagccctcctgacagcaacttcgtgtgctccgtctgccatggggttctcaagaggccagcaaggttgccatgcagccacatcttctgcaaaaagtgcatcctccggtggctagccaggtgccagcgggtacccaaggggctgggagggcaggagtgagactgggggccattgctgtggcccagaacagaggggaaagtcagccaaaagactcagccaccaaatctccctaaactaaaatgtgtgtaccctcactcagtagtgtctgcagaccccggccccaccctcagagctgagagcgccctgtaatatgccctaatgcctcatccagctaatgaagggaccacctgggtcaccgagtgagggcttgaccagggctcccttcccactcccaacactcacccctactcatgcctccttccagacaaaagacctgtccgtgctgtaggaaagaggtgaaaaggaaaaaggttgtccacatgaataaactccggaaaaccattggccgcctggaagtcaaggtagctcaaagtacccactcccctgaccctcaacccttctcacccttgtaggggtggggcagggctaggagagaaggcaggagaatcccatcttcagagagaaacaagtgcagccttgggacgaccagacatagctgagtttggatcgtggctctactgcttagttgctgtgtgactttaggcaagtcacctaacttttccaagcccctgggttagaaaatggagattttagaggacttttaaaatggagattacagaggatttttagaggatcaagtgcccagtgtgcctgccactactctctagtcccctagttttacagatgggtaaaccgaggttaaaaaggaaagcctggcatccataccactcaccagaccaacccaactgtgtaccttccagttccccaagactcaggcctcaccctctcccctggaacttctagcttcttcccacgtctaggcatttgccccagtgttctctccaccaactcaccagagtcagaaaagcgtgggaggctcccggttccctggttcctggcgaatggaaagccaggggtgggggattccgtgggtgtcctgcccggtttcttcacacgttctccttcaccctcagtgcaagaacgccgacgctggctgcatagtgacatgccccctggcccatcgcaaggggcaccaggactcatgcccctttgagctaacggcctgccccaacgagggctgcacctcgcaggtgccgcgtgggaccctggcagagcaccggcagcattgccagcaagggtcccagcagcgctgccccctgggctgcggggccaccctggacccggccgagcgtgctcgccacaactgctaccgggagctgcacaacgcctggagcgtgcgccaggagcgccgtcggcccctgctgctgtccctcctgcggcgtgtgcgctggctggaccaagccaccagtgtcgttcgtagagagctggcggagctcagcaacttcctggaggaagacaccgctctgctggagggtgccccacaggaggaggccgaggctgccccagaaggcaacgttggggctgaggtggtgggggagcccagggccaacataccttgtaaataggtaaataaaagcagacccccggcctgcctgcctctgtgcctgcggccctcacaactgtcaccggtgcatccctgctgccctctccaggcatttgcctgctctctttcatcttttctttttcaaaggaaggaggccgggcgtgggtggctcacgcctgtaatcccagcactttgggaggctgaggtgggtggatcacctgaggtcaggagttcgagaccaacctgaccaacatggcgacaccccgtctctactaaaaatacaaaaattagctgggcgtggtggcaggcgcctgtagtcccagctactcgggaggctgaggcaggagaatggtgtgaacccgggaggtggaggttgcagtgagccaagatcacaccacttcactccagcctgggcgacaagagtgagactccgtctcataaaaataaatcaataaataggccaggcgcggtggctcacgcctataatcccagcactttgggaggccgaggcaggcggatcacaaggtcaggagatcaagaccatcctggctaacacagtgaaatcccgtctttactaaaaaatacaaaaaattagtcaggcatggtggcgggcgcctgtagccccagctactcgcgaggctgaggtaggagaatggcctgaacccgggaggcggagcttccagtgagcggaaaccgtgccactgcactccagcctgggcgacagagcaagattccgtctcaaaaaacgaggccgggcgcgggggctcacgcctgtaatcccagcactttgggaggccgaggtgggccgatcacgaggtcaggagattgagaccatcctggataacacagtgaaaccccgtctctactaaaaaatacaaaaaattagccagacgtggtggcaggcgcctgtagtcccagctactcgggaggctgaggcaggagaatggtgtgaacccgggaggcggagcttgcagtgagccgagatcacgccactgcattccagcctgggcaacagacccagactgtctcaaaaaataaataaataaaaataaataaataaggggaatacaagaatggctactccatagacagaatacctttttcttcttttttgagactgggtcttgctctggcacccaggctggagtgcagtcacgtgattacggctcactgcagcctcaacctccctgggctcaagcaatcctcccacctcagcctcctgagtagctgggactacaggcacgcaccacgactgccggctaatttttgtgtttattttagagatggggtttcactgtgttatccagactggtctcaaacttctgggctcaagtgatcctcctgcctccaaagtgttgggatcacaggtgtgagccaccatgatggcctactttctttccctcaaatatctctcctctcagagattttccctgatcatacttctcagttctccttctcagttactttcgttttttcatttttttcttttctattttttgagatagggtctctgttgcccaggctggagtgcagaggcccaatcacagctcactagaaactcagcttcccaggctcaagcagccctctcacctcagcctccagagtagctgggactacaggcacaccaccacccctactaaattttctgtgtgtgtgtgtgtgtatgtggagacagggtctcgccatgatgcccagactggcccagttacttttttttttttctctgagacagtcttgctctatcgcccaggctggagtgcagtgacgttgcgatcttggctcactgcaacctccgcctccgggttcaagcgattctcctacctcagcctcccgagtagctgggattacaggcacccgccaccacaccaggctaatttttgtatttttagcagagactgggtttcaccatgctggccaggctggtctcgaactcctgacctcgtgatccaccggcctcggccacccaaagtgctaggattacaggcgtgagccatcgcgcccggcctggctgttactttctaccagcttcagagccagtagcacaaatggctcaaaaccttgaactcagagtaaaagctaactcctcgccacggcgcacaggcaactgcatgccctctgccctctgcacccactccctgcagccacccggcttgttgctactcaatgcttggcacccccagtcctaggcctgtgccctggctgttctcaacaccattcgttccacagggctccctgcttcgcgaacttgtgtctgctcaggcgtcaccttctcaatacagcctcctccttcctcccttccgctccctcccttctgtttttttttctttctttctttctttttttctgagacggagtctcacgctgtcacccaggctggagtccagtggcgcaatctcagctcactgcagcctccgcctccggggttcaagcgattctcctgcctcagcctcccaagtagctgggattacaggcatgtgccaccacgcccagctaattttttttttctgtttttagtagagacggggtttctccacgttggtcaggctggtctcgaacttccgacctcaggtgatccacccgcctcggcctcccaaagtgctggg

SEQ ID NO: 96768 - DNA, 65480 bp, Homo sapiens
agtagtatttacccattttaaatctcctgatgtagataattgtactgttgttgtataagggaatgaaaaatattcttacacctaacaaatatagtaagtcctcaacgttgtcagtagattcttggaaacttcgactttaagccaaacaacgtattatgaaaccaattttaccataggcggctaattgatgtaaacaagagttaagttcctatggcttacttctggtgacaaagatatcaccaaacttctaaatacagactcaaaacacttctaatattaaacattgaaatgtaagctatacatacatttaagaaagattaataaaaacaagtaagataattatttacccacattttccagtttagggtcatgggtagctggagcctatcccagcagctcaggaacccttcctgaacaggactccattccattgcagggaacactcacatccacaccaacattcacttagacgtggaccttgtagacatgccaatgaacctaacacgcacagctttgggatgtgggaggcaattggagtatccagataaaactcaggtagacatgggaagaatatgcccactccaggggccgtggctgaaaatagatttttttctcatcaacattataaggaaatgatgttgaatgaagcgacattattcaaagatctgctgtgcacactaaactatttaagagtcaaaggtcatgatgtcaacttctttgcaacatggaccagaaaaaaaaaaaatatatatatatatatagatatatatatatgcacacacacacatacaaagaaaaaataataaggcaaatatagcaaaatgttaattggtgaatcttggtaaaaggtttatgggcattctttgcgttatccttgcaacttttctgtaaatgtgatatattgcaaaataaaaagttaaaagaatgagacagttcaaaattaatccagtattattaaaagaaggcccaatgaaggtaacatattgatgcactaattctacagatgttgaaccacctacacctgtgcctgaggaattaattttgtgttagcaggaaccatgggtattgtcaaataaattagctgatgtgaacaggcctacacttgtacatgatcagggtctacctaataaaaaatcatttaaaaaattaagttacagccacagacaagactgaataactgaaaaactaatttttacagctgacttgcaggatgagtttaggcaaatcttcggactgtggcttctcattgataaaatttagacactaatgcttggacatttagatactaatgcttggaaccattaccatttacagtatttcacagcaagcatggaatctgttttagaatgaatactatattttcctactgaactatgttagcttaagtttcctcccaaataaacctgagataagggcttgaaagtgggtggtttattttagtgacagcaaggaacaggagagagggcctgggaagagtgaaataagggaggatgaaattcaactcaagaatgcattatcaagctcatgacttctgtggcatctggtacttgaccccactacggaccctctgtgaggctaaagaatgcactgtagaattgtctgcccagtggatggaagagggaggatttatccacattctcccaccccttttggcgaaaggttgccccatgaaggtgttaacttgaggtttgcttctgtgtcagtatggctgagtgggtgtcctgctgtagcagagaagccctagacagaactgagagatacaggattcagttgaggtgcgatgctatcaggttacactgtgtgcagttgattgccatagcaatggctggagttgaaaggtggactgagaaaaatgtgaaggaagggtggcatgagacaagaggcacctatgactagcagtatcctgagccaatacatgcacatggagtgatcctgatgcaagttcaaaagtatgacacactgcaaaaaatgtactgaattcatttttataaaatttgttcaccacacacgataataataataataaattatgcaatttttattgtgtggcaaacaccatacaaacatcattattatttcatttaatcctcaaaacaatccttggggtagacatatctcagcgattctcagccaggagtgacttgccctccaggatacagtgagtcatgtctagagatatttttggctgttacaattagagggaatgctactaccatctagtgagtagaggcgagagatactgctaaacatcctgcaaggcataggacagccttccacaacagagaattttccagtccaaaatgtgaatactgctaaggctgagaaatcctagtgtcactatccccactttatagtcaaataaactgagcctaaatgagattacataaatttccttgggtgagaaagctagtaaacaatggagttgggatacaaactctggtctgcctgacattaaccttatgccatgcatacctgtaaccttaccgtactgcctccctactgatggagaactttgctccttagttcagctaaaaccgagttcttgtcacatgaccaggaaaagttaggcatgcacacacattgaagggtgaggaagcagaatttattgggcgagaaggaaaaaaactttcagcaaagcgacaggcccccacctcagagattcattccaggccacatataggaactgaagagcccaggctcctccccactgccagcggttggttccaacttgctgtggctccaaccccattctcccagtgtgcaggccagtcagaggttctccgggaacccccctcttatcttcctcctgcatctatcactcccacagggaaagtacacgtgcatttaaaaaaccctatgtggaaggcacaatgtgactgatttgtatgtcggttatcatagcaatcatagaagagagttgaaaaatgcagataataattagaaatcatcaatatttctgattttataacacattagtatttggaaaatcgaagggatctgactgttcaaaggtctcatgtattcttagcctttcttgtcactctgtcatgttaccacatcaatgcaggtcacatgaaaaggaatgtggtatcaggaggtggtaaatttggaaaacatgggctggagactattcttacattcagaaacaaagcacagattttcagaagcagattccttgtccacactgtgttttccatctgcccctcctttgtagcacagcagtttatgatcactcacaactttcagactctttcattttcaaagaaatctattattattcattagagtagcttcactgaaccaagtccaaggctggccatctctgcccaaggccatcattgtctcttgcacttgccagcagtcagggttaatatgttccaagagaacctgatgaaagggtattctaatggagaataaatagaatggcagagcagggcataacacacaggctttgggctttttcctatagtaagagctgcatcaaaagtaaggcagatcaccttcttggagggaggagagtagaagatgagtggatacagtgtgagctttacaggctgacagacttgaattgggatcccagctatgccacataatgtagggccttgggcaagtcacttagtttgcctaagctttaatttcctaatctataaaactggggcaataatgcctagcatactgtaggtattcaataaacattagctattatatttattaaattttcagtccccaagtacagaaaattgaattaatcatattctttgattcattttgtatgattctcacgggtctgtgcaagttctatattatattatactgtcttttgctttctctttctctgccccattcacattcctgttttattcccttatataagtacataatctattgtgtctgttcttggatatatatatttacttaaaaaattagtacatatcccatatacaggtgtccttaatgttttaaaaattaatgtaatattttaccattgtatagatctcaatctttttttaagcttttcctttattcaatacaatgtgtttaagatttattcatgttgctaaatatatttttaggtcattattcctgaatgttagcctagtaatccactccatgtgtctaccacattttacctacctgttgcccttctgatgggcacataagctgcctgcaactacctgccactccaaataatactctgatgaacagcctgtacatgtgcccttataacttcagcacaagcttttcaacaaatccagggtagtatttaataaaattctacacacatttataattaaaataatctttgaaaagcaggaatagaagaaagctttcttaagatgataaggtctataaaatagatttttatagcaaatatcaaacaaaatggagacatttcagtctttaaaatcagaaagaaaacaagaattccaactaccatagtaaccttcaacattgtactgaaaaatctgagcaacataagacaagaaaaacaaataaaaagaaaaagaataagaatggatgagacaaaattatcattatttgtagatgatatgattatctacatacaaattcaatgaaatcaaaagacaagctctaagaactgaggaattcagcaagcttgataaacaatatcaactttacaaaaaccagtatcatgtgtctacactaataattaccaagtatgaaacatgacaagaagatatagttcacaatagtaacaaaaactatgaaattttcaaaagttaactcagtatatgagacttttatgaaaaaaattaaactctattaaaagataaaaagaaagacttgaataaatggagaaatctaacattgtaaagatgtaagttcttcctaaattgatttatatattggatacaatgctactgaaatttaagcaagatatttaaagaaacttgacgaacttattttaaaatttatatggaagaataaagtctgtgaataaataaatcagttggaaaaaatatcaaaaagcaaagacttataccaccagattctatgaataacacaaagaaataatgatacaaagtgttgaagtcttggtgcagaaatggaaggcacagactagatctattgatacgtgggaatctgtcatttgctggaggtggcttcacaaagtattagagaaagtatatgctatttaacagatgatgtcaaggaagaatggctcactatatggagataaagttggacttctatctcactcacattgcatgtatacttacatatgtgtgagtgtaaatacctgagggattgaagatacttgctgtgaacagtacacttacgaagttaatgaaaagaaaatattatataatgtccttgtccttgtaaactgaggacaggtggaattttcttttaaaaagacccaaaaagcacgaattttaaaatggctgaatttgacaacatcgaaatttaggattttggttaaagcatttcatagtaaaaattaacaagtgatagataggaagtagatatttgcatatttgcaattttttaaaaaaaagttttcttccaaatcacaaagatgagacactcaactttaaaaatgggcaacggatacgacaggcaatttgcagaatggaaaactccaaaactatcacatgtatgaagaggtacttaccctcattggtgagcagaaaatacaaactgaaaaaaaaattattgtttgatgccacccaatacacataagattggtaaaaatgaaaaagctggataatgccaaatttgggggtgggggtggaagtaatgggaagaaaaaggaagtcctgcacaggcccacgtgctcgcgccaacccctacgccccagcgcgccttctccacccacgcacgggcctcggacgcatttccagccccggcgttggttgtggatgctggacatccaccgcctccaggcagtttcgccgtcacaccgtcgccatctgtagccaaagcaaaacatatcctaactgagactttgcagctcttgtggccactctgggctcaccgggaacatgagtggaagagcccgagtgaaggccagaggcatcgcccgcagccccagtgccacagaagtggggcgcatccaagcctcgccattggtgtgtagaatgcttattgcgcatggtttcgttttctcctacctctgtctctagcctgaacaatgccttcctctgcatgtatctcctcctctctgttacgaagtagtgcgttatcttttctctcaagtttgagtctttccaaggtttcttctaacagttttctccttctagggatcttgtctgagtaagatattaacgtaggtatattagccagtaaagaggactgaagattggggacaaatatgtcattctcttctactttctgagttttaatttcatgatttcgttttaaattgccttgtaaaaagtgatgtgctttcataacattacacggcatataatctaatgcagtttttctggctaattagtatataaaaataagtactctcacacatgtggtttagattaaactactgtttcttgagcaaccactatagagaaagctccttgctggatttaggcaactagattgacctgccaataagcaactttggggtgatgttattaatacaactacatattcttagcatttggagcaagtatccaaatgaatagtttgtggtccttatgcctttattctcatgaagtggtcttctctggactttgttcattttttagcaggccaagatggagtaacttcttgaacaaagagaagtagttactatgaaaagagaaaatgctaatggttcccttggcctattttgtgaacctgttttggccctgtttattcatgcagagtcatgatctgagctgctgacccggggcctctgttcattttatgtccgtgggctatggaagcatgaggtccatgtgcatctgtgccgcatgccctctggtgagctccctgggcacaaggatctcatctctgcttctttacacctccagctatatctggcgacagttggtactaaaatcaaagtttgatgagtgaggaaaactatagcgtgtccttatcctcttttctagaatgggcactctcttctcatctctcaagggttttacctgttaacattttctttgcctagttcatggtaatctaaagacctgacactgttcttaggataatcttttggtttgtgacttaccattgtaaatctgaacaaaacttttttttgccattttagcctagatctgttgatcttagtaacaatgaagcatcctctagcaatggcttcttgggaacaagcaggatctcaaccaacggtaagtgcagctcagcctgttcatttagtaccattcaacctgaatggagcaagaggagccctgccaggccttacagcagtaggcccacctcttgcacatcctgatttcctttccttgaaggatcccctttgtcatgttcctttgggactctttaacatagaagcacgtgctgaatttcctgacagtgtttggtagacgggactccatagatattaggaagccagtttctgtctctttctattcactgaaggattttgaaaaaatgctttaaaaatctttatggtgttatatacgaataccatttgatccagcaaccccactgctgggtatctacccaaaggaaaataaatcattatatcaaaaatttatctgcacttgtacgtttattgcagcactattcacaatagcaaagatataaaatcmacttaagcatccatcgatggataattagataaagaaaatgtggtaacatatataagagaatactactcagccataaaaagratgaaagcatgtcttgtagcaacatggatggaattggaggccattatcttttgttttttttttttgtttgtttgtttgtttttgagatggagttttgctcttgttgtccaggctggagtgcaatggcgcaatctcagctcaccgcaacctccacctcccaggttcaagtgattctcctgcctcaacctcccaagtagctgggattacaggcatgtgccaccacgcccagctaattttgtatttttagtagagacagggtttctccatgttggtcaggctagtcttgaactcctgacctcaggtgatctgcccaccttggcttcccaaagtgctgggattacaggtatgagccaccgcccccgggcggcggccattatcttaactgaaataactcagaaacagaaagtcaaatcctgcatgttcttacttataagtggaagctaaataatgtgtacacatggacatagagtgtggaataatagacattggagactcggaaggttgggagggtgggaggggagtgagaaattgcttaatggctgcaatgtacattattcagatgatggttacactaaaagcccagacttcacactatgcaatatatccatgtaacaaaactatgctcttatgccttaaatgtatacgcatttttaaaaaagcagaaaaaaaaaatctgaacggcatataaatgccaatgccatkgcttggaaggatggtagaaacctggtatctaccagtgcatgtagccaactgctctctttcttcccctcctgtggtaaacatcaccattcaakggtagctctcctcacagcaaagccagatttggtctcaggatacttgtcaacatgctactccaagtcaccacaatcacacactgtgagttggcatgccccatgtgttagtctgctagggctgccctgacaaagtagtactaagtaggaggcttaatcagcagaaatttattttctcacaaatctggatgcttaaagtctgagataaggtggggacagggctggtttcttctgaggaccctctccttggtttatccaaggccgtcttctccttgtgttcacatgatctttcctttgcatttctatgtcctgattcctcttcttatgacaacagtcatactggattaggaaccaccataatgacctcactttaacttaatcacctatttaaagaccctgtcaccaaatatgatcacattctgaggcactgggggttaagacatcagcatatgaattttgggggaacacagtgtagcctgtgaccctgaataaaaccagttagccaggccgggcgtgatggctcatgcctgtaatcccagcactttgagaggccaaggtgggcggatcacctgaggtcaggagttcragaccagcctggctaacatggtgaaaccccgttcctactaaaaatacaaaaaattagccaggcatggcggtgcacacctgtaatcccagctgcttgggaggctgaggcagaagaatcgcttgaacccgggaagtggcggttgcagtaaaccgagattgcgcccttgcactccagcttgggcaacaagagggaaatttcatctcaaaaacaaaaacaaaaacaaacaaacaaaaaaaacaatttagtcatctcttttgttctgaccccggtgttttttattttcacaagcaattgatttctaataaatgtggaagctctaagcattaggttctcccagactctgagggtctggtccccccacccatctcatgtctgactctgctgttcctcactgggagttttccagtcctgtgtatgtacccctgtgatccaaacacacaaatgaatgtgcagcctctgagcacagaagccctactctgacaggcccagtgccctccattattttcaaacattattctatccttgcaaatgttttttcacatctgccacacatttttttttgttattaggtttttttatttaaaaattttttattcttatttattttttattatactttaagttcaagggtacatgtgcacaacgtgcaggtttgttacatatgtatacatgtgccatgttggtgtgctgcacccattaactcgtcatttacattaggtatatctcctaatactatccctscccccttcacccaccccacgacaggccctggtgtgtgatgttccccaccctgcrtccaagtgttctcattgtttaattcccacctataagagagaacatgsggtgtttggttttctgtccttgggatagtttgctcagaatgacggtttctagcttcatccatgtctctacaaaggacatgaactcatccttttttatggcagcatagtattctatggtgtatatgtgccacattttcttaatccagtctatcattgttggacatttgggttggttccaagtctttgctattgtgaatagtgccacaataaacatacgtgtgcatgtgtctttatagtagcatgacttataatcttttgggtatatatccagtaatgggatggctgggtcaaatggtatttctagttctagatccttgaggaattgccacactgtcttccaaaatggttgaactagtgtacagtcccaccaacagtgtaaaagtgttcctatatttccccacatcctctccagcacctgtggtttcctgactttttaatgatcgccattctaactggtgtgagatggcatctcattgtggttttgatttgcatttctctgatggccagtgatgatgagcattttttcatgtgcctgttggctgcataaatgtcttcttttgagaagtctctgttcatatccttggcccactttttgatggggttktttgattttttcttgtaaatttgtttaagttctttgtagattctggatagtagccctttgtcagatgggtagattgcaaaaattttctcccattctgtaggttgcctgttcactctgatggtagtttcttttgctgtgcagaagctctttagtttcattagatcccatttgtcaattttggcttttgttgccattgcttttggtgttttagacatgaagtccttgcccatgcctatgtcctgaatggtattgcctgggttttcttctagggtttttatggttttargtctaagatttaagtctttaatccatcttgaattaatttttgtgtgaggygtagggaagggatccagtttcagctttctacatatggctagccagttttcccagcaccacttattaaatagggaatcctttccccatttcttgttaatgtcaggtttgtcaaagatcagatggttgtagatgtgtggtgttatttctgaggactctgttctattccattgatctatatctctgttttggtaccagtaccatgctgttttggttactgtagccttgtagtataatttgaagccaggtagcgtgatgctgccagctttgttcttttggcttaggattgtcttggcaatgtgsgttcttttttggttccatatgaactataaagtagttttttccaattctgtgaagaaagtcattggtagcttgatggggatggcattgaatctataaattactttgggcagtatggccgttttcacgatattgattcttcctatccatgagcgtggaatgttcttccatctgtttgtatcctcttttatttcgttgagcagtggtttgtagttctccttgaagaggtcattcacatccctgtaagttggattcctaggtattttattccctttgaaggaattgtgaatgggagttcactcatgatttggctctctgtttgtctgttattggtgtgtaggaatgcttgtgatttttgcacattgattttgtggcctgagactttgctgaagttgcttatcagcttaaggacattttgggctgagacgatggggtgttctagatatacagtcatgtcatctgcaaacggagacaatttgacttcctcttttcctaattgaataccctttatttctttctcctgcctgattgccctggccagaacttccaacactatgttgaataggagtggtgagagagggcatccctgtcttatgccagttttcaaagggaatgcttccagtttttgccccttcagtatgatattggctgtgggtttgtcatagatagctcttattattttgagatatgtcccatcaatacctaatttattgagagtttttagcatgaagggctgttgaattctgttgaaggccttttctgcatctattgagataatcatgtggtttttgcctttggttctgtttatgtgatggattacgtttattgatttgcgtgtgttgaaccagccttgcatcccaggaatgaagccaacttgatcgtggtggataagctttttgatatgcgcacattgttatgaacagtgaatgatgaaaatccttcatccttggagggaaaattggagttttatttatttatcttaaaatatatataacataaaatttaccatttaaattacttttaaatgtgcagtcttgggagatgaacttcatttattttgttgtgcartcatcaccaccatccaactttagatcttttttcactgtgcaaaatggaaactctgtactcattaattaataactcccattcccccctccctccagctcctggtaactgccatactatggtagcttgaattttcagaaaccacctaacatcttttgaaaccacgagcaatggcttatatggacaatttagtgagggtaatagaattctagaaattcatattactttgcagtaacattttgtatttttataaagttattttcaacatgccagaaagtcagcatcycccgtactaatttaaacagaaaatactcatttggaaacagattttaatttcatgttttctagaagctgtcagtaagtgatatgccctgaggtgaaacactggcttttattcttagggggaatgacctagaataaaaactgatggcaatgttctgggcaatttctcttcttttctttgggaaatgtcagattcatcttctttctgggcagaagttgctgaggacagaagttagtctgtaatccttcagggtgttacacaagagctaacggcaggagagctgccctccctaaataggtatggagaagggaatggggagggagggctttctccttagccaagaagtgaaagtctacaatattacaagggcaagaactaactcaagatctgtttttgtttttgtgagacagggtctcgccctgtcgcccaggctggagtgcgggcgtgaccatggctcactgctacccccaccttctgggtttaagtgatcctcccacctcagcccaggcacatgtcaccacgcccagctgattttttgtgtttttggtagagacagggtttcaacacgttgcccaggctggtctctaactcctgagctcaagcgatccgcccgccatgacctcctaaagtgctgggactacaggcatgagtcacgacatctggccaagatctgttatttttaacaaaacgttctgtgttttcttcacaattttccgtttttaggctgaagacttctgtaatagtcatgaatggtttcagcaatatgggcaaactgtattcaaaaccacaagtttggattgcaatgcatttttgacatagtagttgcaaacagtatcactagaatgaaatattagctgttaccacattctcttcatgttttagataaatatgggatatcttctggtgatgctggaagtaccttcatggaaagaggtgtgaaaaacaaacaggactttatggatttgagtatctgtaccagagaaaaattggcacatgtgagaaattgtaaaacaggtacccagttttatgtcacttacttttttaatgttaccaaatcttgcttaaggacttccaaattctaggtctaaaataaataagttcatatgtttgcttaacagatatttactgattgtcttctatgttcaaggcactgttagacgctttaattttctagccttaattttctcttttattagtagaaataatatcttcccccaaatgacatctcacttttggaaaagattttcttcatatactggggtgggagttaaaaagatgtttcttctctttcccaacatgggaagtaaaaatctttctggacttcagctgtaaaaagaaagacataacctatttgggggattctttacccagattccaggctcacccataaaattgcatgcaaattgtcagtatatatatcttctgggaagtaggtctattgttttcattggattctcaaaagtctttgtggccacctcacgaaagttaaaactcactgatgcggatcagtgttttccaaactttttaaaccaaaataagaaatatattattatccagcatacacacactgtccacacacaactgaagcaaaagtttcatgaaacaatgcgtctcttcctttctgttttattctggacttttcattaaacatgcgattcacctcacctgatttcataactgcagcactaatgggacccagctgccgtttgaaaactatcatatgtagacgatcttgaagggtctttccggctctgacagtctaggttgactactctttatttatatgagcagctaaaatatgttgctttgccatttcctcaggatctgggagaacaaaagagatctgttatttaactaaaatagcacggagatttcttgctcctaccagatatataccccaggttgaagctgaggaaatactgaagcacagctgataccttgtattcctcaccaccttggagtctctgggttgctttcctccatgagaaaagcaaaatagcatctattctatatcattcttttcttttctttttttggagacagcgtctcactctgttgcccaggctggagtgtaatggtgcgatcttggttcactgcagcctctgccttccaggttcaagcgattcttgtgccttagcctcctgagtagctggaattacaggcatgggccaccatgcccagttaattttttattttttatagagacagggtcttgccaggttggccaggctggtctcgaactcctggcctcaagcaatccacccgccttggcctcccaaactgctgagattacaggtgtgagccaccgtgcccagcctctatatcattcttttctataagaccaaaactggatgattctctgtaaggggaagtgagaagaacctcctttgtaccctcctggattctaccctggggggagcttacaccatcctgatcactaactgactatatcgtggccatctctgattttgtcctatagacttttaagatgtgaataaaaatgtctgtaaggggctggaagtcccggaagcacacatggcctccatgtgtctgcagaaaacagaagcccagaaaccytgtctgttttcacgtcggaaaaatgacagttccttcctctctccgcagccttccccttaatctctgagggtcttctctgagattgtttggtctaaccactgatataactttttcagaattttcagaaatatgattaacttttgattatctggatttcccagaggttgggggttgtatattcatagtaagaaccagactgtttctttatgagagcagtataatttcagagcagcatctgaaaatattacttgagccgatttgaattgcagagaatgagagcgggaaggcaagctttgaaaggtgtcctggaatggttgagttcagatgcttctcgtctcacaaggacaggaatgtcagtgtctgctcgtatgttcttaagaggcctgtttcatgcatgatcccattttagctcccaaaggtgttattaggctgcaagttttaggatttatcctgtgtcactgtgcaaaaatccttgctttaaagcaactactatgcataggcaaatacatttttaaatggtgtgattaatattaacatgatgtgatttcctgattaaaaaattgttttttgtttgtcttcttcaggttccagtggaatacctgtgaaactggttacaaacctctttaacttagattttccccaagactggcagctataccagtaccatgtgacatatattccagatttagcatctagaaggctgagaattgctttactttatagtcatagtgaactttccaacaaagcaaaagcattcgacggtgccatcctttttctgtcacaaaagctagaagaaaaggtatagtatgattagtttttttactgtatatgtgggtgtgtgtttattatatgtgtatacacacacacatatatatgcatatgcaaggagattccaaaaggtttgtggaaaaatagaattaaaaggtaagaatttaaaaaactacctttatttcttaccaagagttttaccaaggtcaagacacttttataagcaattatatcagccatttagtccatccctagagaactaagggtcctgggaatttaaccacatcagtgcagtcttttttagcttattaacgaaagaaaaatgggtgccctttacattgttttatattttaagattataaaacaaaaaaagtcagaaggagccaaatcagcagtaaagtgtatgcctaatgatttcccattgaaacttttgcaaacttacccttgtttgttgagaagaatgagtagaagcattgttgtggtgctttccagggaagctttcctggccatttttctgctcaagctttggcaaagtttctcaaaacactttcataataagcggatgttaccattctttggccctccagaaagtcaacaagcagaatgcctggagcatctcaagaaactattgccatgacctttgctcttgatgggttggcttttcctttgactggaccacttccacctctcrgtagtgattgctctgattgtgctttgtcttcaggatcgtactggtaaagccaggtttcatctcctcttacaattttttgaagaaatgcttcaggatcttaataccatttatttaaaatttttattgacggctctgctcttatctgcagccgatctgaatgcaatgaatttggcaagcgttgaatggaaagtttgctcaactttaattttttagtcagaattgtataagctaaacaaattgagatgtctgtggtgttggctattgtttctgctattaatctttggtcttctcaattagggcatgaacaagatgaattttttttccttgcaaatctgtatagatggtctgcagcaggcttcatcttcaacattgtctcatcccttcttaagatgagttatccattcgtaaactgctgatttctttggggcattgttcccataaacttttcattatacatcaatgattttgccattcttctacccaagtatcgccaaaatttgatgtctgttctggcttcaatcatagcagaattcatattgctctgacagggtctctgttcaaattgaggtcttattcttagtgtctcacactggatcctgttagtatgagtttatttgggtgcaaaatttttgaaatccatgcatagttttttcataatacatattttccatgaactttttgaggtctcctcatatatacttatatatttaagagattagttgattttcatgacagttggaatgagtgaatcactcctttcctttttcctgttcccttgcctgagagctaaaaaaagacttcctaattaagatttcactagtaattgatttcttaattatgaagctggtggtctggtatttttaaaataagagctgtaagtgtccttgaaattggcaccttaaaaaataattcccaaagtaggcaagactaagaaacaccatttggcctatggcttcagaactttaaattaattctacmtttttttgctcctgcacccttgtgccygtatgtccaaataattttacatcaatttttgattctagaattgccgtttatttaactacttgctcgatcataagaaattatgagttatttatatcaatttttaaagtttttttaatgcaaccattggaaatagctattgtgtatttcatattcctttatccacctttttacacatttgacatattcagtcctaaaataaagatggtatggatgtttttaacatatgttttgttctaaaacaatgttacaattactacaagaaaaaaagaaccaatttctgtgtgaaaaattaaaacagagcattggattaaaattttatgcttctatcccttagaaatcttagtcccttggttcagctgtttgtttgcagagtatggtaccaatagcttagatttaaatttttagactctaggtaagtgtttgtgaatttcctcatgaaatgtgtttcttagcactcttgggccttttgccttttatgagaccctgggatctataggagctgcttgagtgattgttgcattggatatggaacattaaaattataccatatgattaaatttaatggcttagaaaatctagatttgtaaattaagaaacatttttattcaccataattttttattgatccttcaattctttgtcctatgaccagatgttgatagcacgctaatatggcttctcatacttaaatgatatatttyaagtctgttgttaccattaaaaatgttcttgtagatacatttctagcactagtttagaaatttagatacgttgaaattattaaatactacccttgaagtgtccagcttacttccattgtacctaaacagaatgaagaccgtatacgctacaaatgctaagaatatgttactgctactcatttctcattcaaaatgagcatgtagtatgtgtcaaacacctttctgttgctgggaatggagcctaataaggggacaagtgagaaaatagaccataaaaacatggtgtgacaaatcaggcctgtttattttatttcccagatataggggatactaggtttaaacagaatagtgttgtcttatttcttataaacatatgacctgtcacccagttacagtgcaaaagaaagtgtcctaatgaagatactctcacctttttattctgatcttggtattgactgaggcttaattctgcatcctcatcatcccctacacatgtcctaggatgcttatttaagttgaaacatctcagccactagttgacgcaatgaactcctaggagttccaggattcctgttcagctgcctcctagccttccactgtccaggtcctatctgtgcacctgcagccagactggtgttgctattcatgtccacatctatttgccactctcatatacttataaagagcctactctgaacctggcagggtgttgcgaccatggagcaaacaaagrtaaataaaacagagtacttgttctccaaaatttcaatttcgaataaaagttctttacaaataaatactatgtaaggtagaatgaaataagtgtcataataattagtatctttattatgctagcatttattgagcacttactaggtgttaagtactgtccttctttgttctccaggttatcctcaacatctctctcttgagcagatctatactttgtgtcccacaagtagctgctaccaccactgctactaccagttacacctatcagattacatgtgttgatcacttactctgccaggcttttttttttttttttttttttttggagaaggagttttgctcttgtcgcccaggctggagtgcaatggcatgatcttgattcactgcaacctccacctcctgggtttcaagcaattctcctgcctcagcctcctgagtagctgggattataggcacctgccaccacacccggctaatttttgtatttttagtagagacgcggtttcaccacattgggcaggctgggctcaaacttstgacctcaggtgatccacccgcctcagcctcccaaagtgctgggattacaggtgtgagccaccacgcccggcctgccaggctctttatagcatgatctcatttaatcctgtcatcacccttggggcctagtgaggctaaatatattgcccaaggttgtcagagagagcttgatgaaaggcaagawtatttctagcaggacacctgagcgagagtgatagttccttgtttaggattttgatcagtgaggtggacaatgggagatatgggattcctaggcagaagaggcaaacatgcaatgatgggaagtgagggccatattttagaaacttttgctcattcaggtttagctaggaaggtgtggragttgtgatttcaaaggtaaagagaactttaaatgtcctgccaaggaacagagactcttccatggatcactgaagacgttggagagcatttccatggcagctgtgttaaattacagttactctgatcacatcctattgaatggtttacagaaggaggtgggaagagtagtaaagtgccactgaaatagtgtgggcagggtgtcgaaagggcttgaaaagagatacaaagtgctgctatttatttgaattcctgagtgcctgtgcaatggatggaagtaaaatcaatgcattatctcatttaatcgtcacaaccctgtgactttagttagactcagtatcagaaaggtgttccacatcacaccagctgtaagaggcagaagaccagggtccatccaattccacatcatgtgctcttaagcactgtggtaaataatggtattggaacagctgagatagatcagagacattcctggtgtagatacaataagacttgccatctgattagattgtgaattgaggaggagaaatgaaagtttactgtgaggttagcagcctggggactggagggtctgaggtccaataggagatgtaggaagtgaaacaggagtgggtgtttggtgggagaggtacaaggcggggctgaagagtttgmtcttaggtggttgttgaaaatgcagttcctgagaccatctgctgccacctcccctcaaccactcatcccaaaggattaagacatcctttgttgtcttaatcctttgttccaaagcccctgcagcagtttgagaggtgggcatcccttctgtctgccagagttttccccatgttgatgagctctttctatagctgtccacctctgatttctgtacaattttatctgaagcaagaaattatctcgatgaaatcttacatccctgtgaaaagatcagtttctctttgtttccatgcagtgactggttcctgccttacattcttgatgcaatctaaaagtggttacaaccatactgtagctgtagaaagtagaggcagaatacataaatgcttgctaattagctgactttatctaattgcttatccctttgaaaaatccatgatcattgattgatatttattgactgatttgtatattcctttatttcaagaacctattctgagtcctttctggttcaagaagctttacatttagtgggagctgttatagaatcatattcatgtgttcattatattgctagaacattgttccaagttataaggactctaggtttctctagacctttcagcaatttataaaatcagatttctgatctgttctaatttccaccacttattcctctctctccccatgtttactttccctctcatttatcctctctcctttctttccttctctcttgttctctgctcttctacattataaacagactttgggaggctgtcctctggaatccatgaacttgggatgggcaggacagtccactagtgggcttctgagtatcagtgaataccctgaaaatgggtacaattatgtacactgttgtggtgtgtgtatatatatatatgtgtgtgtgtgtgtgtgtgtgtgtgtgtgaaattttattgagaaatatctaacttttatcagactctcaaaataatttgtgacccatctccctcccgctccctagaaaaatcaagaaccactgctctggaactctctttggaccaaactttgaaccatgagtctggctttaattctcccttaagaagttagagagtagagagatgtgttgtttttttaggattggcaagatacagagaaaaaaagccctctgaacataatgtgatgattagattattactcatactaacacctgcagttttgtttttgttaatgcatattacattgtgatggctttataatctgcattctgcacacttggggataatttgtagggtgcatattaagtacctctttttcccaggtcacagagttgtcaagtgaaactcaaagaggtgagactataaagatgactatcaccctgaagagggagctgccatcaagttctcccgtgtgcatccaggtcttcaatatcatcttcagaaagtaaggcactggaaatgtgaatttaatttgggctaatgatacctttcagcatagagcctgggtattaaaataatcgaccattttgtaggcagtgtgccagcagtgatgccaccgttagggcaatttctcaagcaccttctcctacatgaacaataatgtgcaatgcagcccattacagccactcagtggcacagactgttaatatccagtattgtcctaagttgagacaaataatacggggattattgctgtctcactggtagcagggagggtacccttttccttttcttctttttctgtgtcttttcccagacttaaaagttcatttagcaaacttagttaagtttggcttaataaactgaagaatttgtttttctcctagccgattgatttaggaaagaagatcactgtctgctttctgccctggctccaccctcagcccatttctttcccccacacctacatgrttgtagctcagctcttcagtgttctgcagactggtctaaggatcacatactccagcgtcttcttaggggtggartggagctccataaaaggcatattccctggaccttcactgaatctagttagtaaacagaagttcacagataggcctgaaaattcacatttttaggatacactgaagcttgagaaccactgttttacatgctgctagtgtggatcattaagatgatctgttagaaaccttacaggcaagttctttgttcaacagtgacctctggaaggcatgaagatggggaagtttggggatttcctgagtcgtatgagcacatcaggaacttcccccacccagatgtcctaattcctaattccagtcagatgtcttgtccagcaccttttggtcatatctgagcctcagcttactgcatatcagctcttcagaagccagtcttgcatgctgacatttggaagatgctttcagtgagaaagttctttcacttgtcttttatcttactttaccctcactagagcaacccgaggcaagtgctattaaaatccttatttttaagagaaaggggcttaggctcagtgacatttggcagccaaaatcacagttgraacgcgtttcctgacttgaaacccccatgtaggtcaaattcctaaggtgaccaggattacttgctgaagacacagtcttggtcatttggcagtacctggggagcctgagcagcctcattagaaataagatcctcggctgggccggtggctcacacctgtaatcccagcactttgggaggcagaggcgggcagatcacctgaggtcaggagttcgagaccagcctgaccaacatggagaaacctcgtctctaccaaaaatacaaaattagccgggcgtggtggcgctcttgcctgtaatcccagctactgcggaggctgaggcaagagaatcgcttaacccgggaggcggaggttgcagtgagctgagatcacgccattgcactccagcctgggcaacaagagcgaaactccatttcaaaaaaagaaaaagaaataaggtcttcatccccaagtagggaagaggtcaaaaaggcctgcaggcatggcttatctcaccccatccaagctaaccagaatgttactacccataatggctaattgaccacatatttgtcactgcagctaaacccagacagataaaaataatttcagttgtagtattctcaaatatgaagaagtgatagttctttatagacattcatatgtatatttagtatctaaaccttgcagwcctgtgagaatgagaggtctgtatttcctatatatttttaacattatgttcagtaagggtttgaacttagaattacactgttactgactgatatttaccaaaaattcaaaaaaatatacttgcaggatcctcaaaaagttgtccatgtaccaaattggacggaacttctataatccttcagagccaatggaaattccccagcacaagtaggtttatttatattttctgttactccgaaattattataatgtgagcaacataatttatgatgcaatattataccattatgcctcctgtgagagactctgtgatatgaaatgtaatgaattttttataattttcaagtttttttaataaaatggttcatgtgaacgtgaagctagcagctttgttttcttayattagtgtgatagataattatcacaaatcctagaaggaattcagaaactgaattttctgtgtgtaataagtaataatgaaagcaggatgagctgtattttgttgttgaaaggttgttagcacagccagagtggttgacatgaaattggcagggcagcgcgggtcagaaagagaagccaaccaaataactctggtgaaggatagaatccttatgaacacctgcagaatttctacctaaactgggaattcgaggcttcagggaaagtggtcagctatgtcttgaactggttgttacttagctctcaaaaatactgtggtcaaactatagacagagaggcaactggtagcccaaacgtagattcataaagggagaagtgcataaaagatagaaaatgggagtrgggtgtttggccttctgcttggtggaggaaaaatgacggagtttccatatgttcattcagagtgtcagcgtgctctctataaagcacccaattcgtccttgtcactaatctgtccacccggattagaaaatctcataggtgctgattgtactaaactgccctaggtgctcagcacatatgcctgtcccggaggctggcttagtatcacagtgtctacttaatagtccacaaaatataaactggmattattttttaaaatagtmgtctattatttcatgccatttctgtaacttcttattcaagatttttaagtttatgtgggaagaaactgtaggctgtgttccggtttctcttgtatatctgtttgtggtatcacttttgtattttttaatctcgtcattaaatctatccactgccctcacctttgaattggggtgcttttctgaacctagatgttttcctgcggggacagatcactccataaatgtattattcctatagttacggttttcaggcagggacatwtccccccmctcttcagggaacattttgtattgtctggagacgtttctggttgtcacagctgggaggctgctactggcrtctagtgggtagaggccagggaaatgctgctaaacatcctacagtacacaggacggtccctaacaaagaattatccagttcaaaatgtcagtggtgccaaagctgagaaactgctttacagtaaggtattttatcctaaatgtatgcttaaagacactgcagctgaaaaaaagttttcagtcaacaactggaagaaatcagactaaagaaaaaaattatcttgttaagatctcgagaattagaacagaaaatcaccatttaaaaatctttattgtgtttccggtataacattgacaatattcctttttttcttttttgtttttaaagattatccctttggcctgggttygccatttctgtgtcatattttgaaaggaagctcctgtttagtgctgatgtgagttacaaagtcctccggaatgagacggttctggaattcatgactgctctctgtcaaagaactggcttgtcctgtttcacccagacgtgtgagaagcagctaatagggctcattgtccttacaaggtacaagcctgcgtctaaataaacttttcttcagaaatcaatcattgatggtatttgggaataggaatagtgttggagtattggcccaatatcacagatctaatccatttactcatctgtttagaagacctggttgttttgctgtctggagttcacatgtccttgtgtggcattctggactgtccacaagctccaaattctcgcttgcggtaccctcctttcccctaatgccactctctattctaacccccagcggtctgcactttgcatgcttcagttcagttcaattcagttyacttcagttgcctggattcccttccccaaattctgccttttaaacttcagttttcacaaagctcaattctaatgtcctggcttttctgacacctccatttgcctacttagttggaattattcagtttcttcccctgggcggcgcccatagcactttgcttatggctaccttgttgtggccatcttatttcattttacaggacagaaggttagttccatgtctcaccttctttattagattcaggagtcttttaagttgagaccacattttacttctttgcaacctctaggtttatgtatataaaatttgccctcattgcacattgagctgagttaaacacggaaaatttagatgacttcctgagtactaaaaagctcacatatactgctgctagtccaagaacactttttaaaaattttttattttaagttttgggatatatgtgcaggatgtgcaggtttgttaagtaggtaaaagtgtgccatggtggtttgctgcagctatcaaccatcacctaggtattaaatccagcatgcattagctatttttcagaatgctctccctccccccgaccctatcacctgagaggccccagcgtgtgtttttcccctcctcgtgtccatgtgttctcattgttcagctcccacttataagtgagaacatgcggtgtttggttttctgttcctgccytggtttgctgaggataatggcttccagctccatccatgtccctgcaaaggacatgatcctgttcctttttatggctgcaaaaatacttcttttaggggacttgttagctttctattctggcttagaatttccacttaaacttgtttttctgggatatatagcagaggggtgggactggctggattccacactactcggtatgagaaggctaccctcttatcctcctgtcatgatcttgatggattagcttatcacatttcaaagtcatcttggaaagaatcaaaagctctagagaaacctgctgtggtagtttctgcccctaggctaggtcatcctgagaggacagtccaggctacacagtgctgaaggggagaaggagcttagagtaatcttagctaacctgttttgtagttttgccaagggccagccctagcgggtaggttaagcaagaygccagcattgtgggttgattggccttcttttggtgcttttttwaatcagaaaaactacctgggaggtcagaaactcttgagtgacaccagaagataatgggaaagttttgagcaatgcttcagcctctgaacattyaagaatgatttacctgaagttagagtatctatcagtgagaaaactagactgtggtctaaggacttycccacaggttttgttggaatgtggacagaagtcttcctgtataggaaattattaaggaatgcccttttcagataagagctgagtattttttaaaaagtgaatattcttgttttattgttttcataatttctgacattctggagtctatcttatgtgttgaattaaaagtgtggtgaagtagctgcttatgttagatgattaaaaaacaatttaaagactttttatatttggcagatacaataacagaacctactccattgatgacattgactggtcagtgaagcccacacacacctttcagaagcgggatggcaccgagatcacctatgtggattactacaagcaggtaggacttttcttcatgcatctctatctccttttcttttacctcagagaagtctccttattccaagtctcagaggtcccccagattggaggctgagtctgcctccgacctgattctctgacttgtctctctccttcatccccaccctcccagtctcctgttgaccctcatcctatctcctgtttccttcttcctgtagtctgagtaatctccctttaaagcatatctgatcacactgctcgcaacgctaatacatttccatgtctccttattgccttaggaccaccygtaagccctttagcagagtttccaaatctccttatgatgtggccaattcctgcctttaaagcctcatctcttcccattcccctgctcccttccctggctctgatgtaattgcctcttgtgattccatgactcagtttctcccctgtgcattttcacacgttgcttctttttcctggataccccttcacagccagacgaacactagacacccttgcatactcagctcagccatcaagtctcaagggagccccaaagcattcctcccagaatcccctccctgtctcaggtcatcacaggcaccacacgaatggtctgagccccatcctagacattgagctctggggagggggctccttgtttttggattcccaggactagctcagtgctttgcgcatattagatactcaagaaactattgatggaatctgttgctgcctctagaagctctagycgcatttgcaacagttatccttacccctcatcttccatgttcaattctttttgaaagcaccttctctttaatgtatagtaatattcaggttaaaacaaacaaacaaaaacaaaaaccctttcttgatcattgtacactttcaggaaaagctctttttctccttagctaactttagaaagtcatttacactagctccaagcaccttttctgttcttccttcctgaaacctcagcagtctggtatccagttatgctgctttagaagtagttctagaaaggtcaagttcagttactgttcttatcctaaagggctttcagtgcatttgatacctgtgacctctcccaccggctggaactgatctcttccttccttgactcctgggacacatccctgcggttctctgctactttcaggttgttctatcttagtctcctttgacrttttcctccttccttcctcacaaaggaaccattattcaccatggttccctcatatagaaccttttcattgtattttgagatggctcaaatatagtgcttttgcctagccctcattcccaaattacatattcatctccatttccagaacatatttgcatgaataccctgcaggcatctcaaactaatataattcagactgaattcattgtctttcccattcctgtttctccttggaaattctgtagctcagataggaatgattttgctttcttcctcttcttcaccttaacctcctcattcacttgtcaccaagacgagttctgtatcctttatccgtgaattttctttttgccagccctgttcccacygcattaatgcaggccatctygtggatcccctcccactaccgtcactctttatgccctagctctctcctcactgtgatccctcaccctcacagccatcagagagatctttctgaagtgctgcccagaaatctgattacaagcataagctctggagtaagatggtcctggctccagctgtgtaaccctgggtaaatcactaaacccagagtgtcatgtgtaaaggaagtttatctgtctaccttcatggtgtagtgtaagaaccgagtaagataattatgcacacagagcactgaagtgtgcctgcactttgtgagcactgggagaacagtggagaccatgctcctccttttctatcctctgcttcttcctctctagcactgcatagtttggccccctctttctttcttatatttctcagcatccctcctatgcaccccatgcctttatcaccccatccactcactgrcctacaccttcctcagcctttgtgtgtgttcactaggcatctgcagaaagccaygctgtacctttctcctttacccctaggtcaaatcctagcttcaaggccaagtgtgaagtcctctctgactttgctttctgtcacacacgtagaagagcaagctgttctcctttctaagtacctgtgcattcatcacattgtttcttgaacacgtattccttggagagcaaggatggtgtttggctaatccttgatgcatagtatctagcaaaacatcttgtgcataaaatgtgttctgtgtttattaaaccaacagtttgttaaacatttgggtttctttcttgcatgattaaatttgttcatatttaaacagaagtattttaggacctgtgacattctgaaacgggaatcatggtaaaaatcccagtcactgtttttttgaaatgagttgtgcttcactgcatatatattgtaattagggaggaaaagaaagaaaactgtgacagcttctagtatgccctcctccctgtcccaggaaagaaagactrattattatgtagtcagttttcaaagtggaagacatcctgatattgacctttatatttctctattttatcttatcatacaaagtattttcaaatgctaagaaaattggggcaagggagagggtcacatttaccttgtgagagcaggttaggggctagagttcttgaccatgctccagctagagtccttcttcctggaagatgcctttgttttgctggagctgttacctgagactatccgtactcccatgttttcttcaaggtcctctcttggtctccacctgcatggaggcttccctgatttgccagccataattgtgtcactaccaccatctccttttcctccccacccctcccactccagcccagggatccagtactgagtggtataataagcagagtcttaacagatcaatcctagctgtgctaatttccagttatggagccttgggaagattgcttaatgtttcacagtgttttctcatctgcaaaggggacaataatagtatctctttcatcrgtttgttgtgctttatcgtgctttgttaagcattgtttgtgcttcttgtggacctcgctttgtagataatgtattgatgcagaaaggcagggactgtgcctcttttattttcttatccactgccgttcctggaacacagtaagcacgccatgtgttctaaattaatggagtcatgcatacaaactcacttgataaaggcttctccaaactttttagccatagcatcagttgyacctgctactttcaaatgagattcttgacttggtttttattttaatgacaaagtttttcttgaaatatagaaatgctcacatttgacttctttwattgtgattattgatctcagtgtcacaatacccaggcattttrtaaattataattccagttgttctgtcactaatgtggattaaattataatggaaatgagtgttcattgtaacctttgtcattagagggtaaatgagcttttgccaaggtgagactgctgaaacttaagtttaggatggtaaagggagaggaatatgaactaacagttgccggggattcattataaaccagaccccatgctagtggtttacacaggatacctgtgagctactgttatccttatttcatagatgaggaaagttaagtcacttccccagtgtcacagcccaagcaaatagaagagctggggatcagattcacatttgtcagacttcagggctgcttccccgtaacatcctactatcctagaaggtaaggacagtcatgctgttttgggaawtctgagattgtctcaatataactcgcctccagcttgtgtatagatawtttcaaaatgaatatagatgtttagagccagatagttaagcatggggcagtctacctcagtcatcagtagtagaaatgctggctctgagtcagtcccagtgatgtcattgaactatgtgtagaaccagctggagtctattctgaatctggctgaaaccragagacagcagggaaacgatatttttaatggtgttgcattagaaaagataattaaaataataaaactggccctcagatataaaagataggtcctgggaagaaagtagcaataagtaggtaactatgggattggttagatttatttatatattaatgttaggatcaccttgttgaatgtaaggatgctcacctggcggtgcttccatgttaactttttacttattaatcttgcattttatagcagtatgatattactgtatcggacctraatcagcccrtgcttgttagtctgttaaagaagaagagaaatgacaacagtgaggctcagctcgcccacctgatacctgagctctgctttctaacaggtaatgtttgtgttttatacctctgtcaggctcctggatacaggcccctgatgcttggyagtgggcagaccctctttaagttacatgaatgccaggacatcgatttaacccatggaggatggtccttttaagtaatttattcaataatagagacatgttgggggaatcgattycctttatctcatatattccatgtattactttgatgtaaaatagaccccctgatatcatcctaaaaccaagtttctctttgccattatttgaatttactagtataggaaggaatgtgactcagattttcttcaggtgtatcagtagagtggtgccagaatgatccatactttctttttgcgtgaattttcagaatataatcctcattatacagtaaaatctgaataactgcctcgagtacttttaacaatgttcttttgactaacaggtaggcctaggaagtgaagactttctacgttttgcatttgtgtgttccttgagtcagttatgatgtgtatatatctattttgccattagaaaaattaataagaagggccggcgtggtggctcacacctgtcatcctagcattttgggaggccaaggcgggcggatcacctgaagtcaggagttcgagaccagcctggccaacatggtgaaaccccatctctattaaaaataaaaaactagctgggcccggtggcacgcgtctgtaaccccagctactcaggaggctgaggcagaagaatcacttgaacccaagaggcggaggttgcagtgagccgcgatcacgccagtgcactccagcctgagtgacagagcaagactctgtctccaaaaaaaaaggaaaagaaagaaagaaaaattaatgaggatataatccttgaagggaagggtgttcattctttttattttttttgagatggagtttcactcttgttgcccaggctggagtgcaatggtgcgatcttggctcactgcaacctctgcctcccgggttcaagcgattttcctgcctctgcctcccgagtagctgggattacaagcaagcactgccacgcctggctarttttgtatttttagtagagacggggtttctccatgttggtcaggctggtctcaaactcccaacctcaggtgatccacccgcctyggcctcccaaagcgctgggattacaggcatgagccacagcrcccggcctaaggggtgctcattcttaatggtgttctgatattgtaggtctgcaggacccaatacagtagccagtagcacatgagtttttgaacacttgaattgggactagctctactaaaagactgagaggaggtgtgctttaggtgtaaaacacagcccagatttgaaaggcttagtatgaaaaaaaagaaggaaactacctcaacaataaatgttttatgttgattgcatgttggaatgataatatgttggatatactgggctaaataatatacactattcaaagtaatttcgtctgtttcttttttgccttttcttaatgtggctaccagaaaacttaaaatgacwtacgtggttttcatttctattggatgtgctatacagatggtgaatgcattcaagtggaaaggtttaaactgggcctttgatgggctgagttgcttatgttcattttctcactttgtcttcatttgcatttaatagggctgactgaccaggcaacatctgatttccagctgatgaaggctgtggctgaaaagacacgtctcagtccttcaggccggcagcagcgcctggccaggcttgtggacaacatccagaggtactggatcaccgcatgcatccttcctggggctgagtttttagtattagatggcctaygtaacactgatatattccttgaaggaaatgtgtcattcatattgattcagagcaaggagcttttgaattgtgctgtccacagcccttcatctgagatgtctcaggactaaggggttgaagggagttggaggccatgctgataggaataacacttgctttacctccatgccctgctttcatctatttcatacattgaagtctggataaaatgttgaataaagaaaaaggttataatctaaacaataacaacaaccttcaagcaaacaaagcaaccagaaaaacaccaggcccccagtattaagggtcaggaatgctcagctcttactacaatgkcctcagcagactgaactttaggaaaaccccactatgtgccttttaaatttgagatatacctttgtgccatctggttctgcccatctgattatcagactatgtttccgttcttatttatgacagtttgctataacatgtgattggaaaattgagcttctccttggttttcctttctgaccctctaaaactggactatctagggtggctgctgcgcacttgaaatgtggctagtgacacatctagaaatgacagttttttaatctattgggttaaataggttaaataacatatatttaaaacgtaatttcacacttgtcatttttttactttcttaaggtggaagtaaaaattttccatttttactggaaaatttataattatgtatgtagcttgctttatattcctattgggctatattgttgatcaacagtctttttttttttttcttaaatcttttttaaagtagtactagctcatggaggatttggaaacttacgtagcacaaagaaaggagagagaaaagagtgtgtatgtgtgtttactcagtaaatatttaacaaatgagtgaatcacaatkgaattaataattaattcaattaatattagtaatattcttycagactctgcaaacgcatataatcctattttttaaaagagaaatggtataatactgtacgtcatgttttgtagcttgctcttttcacttcagggttttyctcaaacatttccatatgataaacatgatctctattatcatgctagtgttttcatagttttttaatttcatggatatactttacgtcatttaccctggacgtccctcagacttatgccgaattgagaaggaattcctggttcgtttcccttatagtgactgtggattaatcttcctgatgcatctatctgccacctttcagtagtaccacacacctcaccccatttcctgaccaatgatggcctcactcatctcatcttgggcagttggtatctgaagcaaaataattaactcaaaggaattagtgtgaccagagaagacataatccgaataggtggaaatagtgagctattgcagagagacagtggtgaagaggtttgagcttccctaaaaaaattggtagagctttaatagggaaacaaaagcgtggggatctcctccatgtcccgcaaatgcctggcttactgtgtgctgagtcctatatatggttgtcactctcaaggagcttatggctcagtggaagttatcatatactcccatgagctaaaacatcaactatgattaaagcttattaagttataaatggaaagtactacacaatagaaagcagtgttattattgctgatattaatattctcctcataggatagagagggtaataggaagatcctgaatcttctgaagcttacattcttatgttcccttcttttatcatccttcttcgactctcaacccaagaaattcacatattcacaaaagacatctccacatccactggctccaaaatatctccttattaacgagtgtgttatcaggaatgataatatctcataggttttragcacatgccatgtgccagggactgtggtgagcactttctgtgcattatcatatttcatctttatatcaatcctacgaagtaggtgcttttattatccttacattttgccagtaaggaaaccaaggccttaaagatgaatagtttgctcaaggtcatatattattaaatgttagagctaggagttaaacccaggtctgtctggctcgaaagcttatttttctaaccactgtactcccactggaatccttttcccattcctgaacatcccaaatgagcacagttgtcccgtaattcttttaagcagggaaaaaatatgctgagtagaattagaagccaggaatcctgaagacacagaaaatcagcccctgacgaattcagtaagttataattatatctctctttaatgatttaaaacaactttatcaacaggaataccaatgctcgctttgaactagagacctggggactgcattttggaagccagatatctctgactggccggattgtgccttcagaaaaaatattaatgcaagaccacatagtaagtgctgtgattttattttcatttaaaagtatttacttgaatatgtgtaagttttgtgcattggccagagtggcttgtgtgcttataatatttggtttggccatgtacttccatctctttatcctaagacttcagatcccctgtggtttccttttcaatctgaatttacttgcacggacttagcggcacccagtggacatgatttaggttagtcagaagacagtatttcaaatcattgcaattaaaacatacctatcttctgttgggtggtgcattgctcttaaaaaagaaagccatagtcatctgaggaaattctattagctggtggacattagttctaatagattgttttctgataccaaaactgagcccaggaggttaaggctgcaatgagcttttgcaatgacttttagttgccatgtcagttatgtatgttaatctttcgaaataaaacactgctcaatggacattaaaatcaagaagtatgcacagaacccagccccagacatagtacttggggagagaggcattctgaaacctgaagagacaaatcatcgccacttccagacttcggctgaagaaatgaacctattaatattttacgcaaaaattatacattatctttctcccctccccctccgttttgcccactttaaaacaccagtcacatgtcatgtttaaaggctctcttcttgcctttattgggtgtaataaaccagtatgtctaactgatataattgaacaatgaatgtatcatgttggtagaatggggggaatttttttcatctttttttttttttttttttttgagacaggtctcattctgttgcccaggctggaacacagtggcatgatcacagctcattgcagccttaacctcctgggctcaagcgatcctgccatttcagcctcccaagaagctgggactataggcgtgcgccaccatgctcagctaatttttgtattttttgtagaaaccaggtctccctgtgttgcccaggctggccttgaactcctgggctcaagccatcctcccacctcagcctctcaaagtgctgagattacagacatgagccaccatgcctggccttgtcatatctttacaataatctatccaagttacaaaaactctcattggagaagataaggaagtactatttttcaacacaaaacaaaacaaaactttatggtaaagtactaaaatgtagactcccattaggatcttggcgagagttcagtaaagagaagctcagtttcagatccacatgtgaagaaggacttatgtacttaaaatgatccatctcataatttctataagtaaagycgtatttcccagagcctttcatttttatgtatttgtttgcatttttttggtgtagaaactggtgtccataggagaaagggcattaaaacaggagaactcatgcactggaggtagcaggtgtctaagatgacaatatcatcaacttcttggcccattctgcttttctgaaattaggtcctaggaactgaatgaactaaaagttcataggactcagggtacattgtcctgggtctcctcccagccccataagacaacagcaggaagaaatgttgtgggcagaaggagtacagctctcctcatgccctaatggacaggaatgaackttgactccagagggagccattgatggaaagctagcccttctcctttgctctcaggccgaggtaggtggactcctggggctgaatccagcccagccagtggaaggcatcatgaggatggctgatggttggaagtcagataagtcagagtgcttggtcacaagtgccctggctgccatgtcaggagaccagcattctaaacctgtcgctgctgccaagtggtttcataacctctcagtcacagctttctagtttgtaaaacaagaggattgggatgtttcttaaatattaatgtacatgtgaattacttgggggacatgttaacatgcagattctgattcagtgggtctcgggtggtgcacaggagtctgcatttctaactggcttctaggcagtgctcaagctgctggtcaagtaacacttgacagcacttcaagtagcaggagattagcatacaatgtggtcccttttagttctaacagtggatcttccccacttgctgtgccaaaggcatcattcaattatagtctgaggatataagcagaggtctgggaagcaggctaacattccccctcttcagcgcaggaaacctgtttttcctggtcacatgagagaccttttgagagtgagaaaggagtctccatcctggcttcatctttgcttctaagcatacctactcctagcttaatatataatcttaactatcagggaacctgccccgatagtcacataggttattttctattttccttaagcatcggctggtttgagaaataaagggacagagtacaaaatagagaaattttaaagctgggcgtccaggggagacatcacatgtcggtaggttccatgatgccccacaagccgtaaaaccagcaagtttttattagggattttcaaaaggggagggagtgtacgaatagggtgtcggtcacaaagatcacgtactttacaaggtaatagaatatcacaaggcaaatggaggcagggcrggatcacaggaccgggcgaaattaaaattgctaataaagtttcgggcaccgttgtcactgataacatcttatcaggagacaaggttttgagagcaaccggtctgaccaaaatttattaggcaggaatttcctcttcctaataagcctaggagcrctataggagactgggtctatttcacctctatagtctacagaccataaaagacagccacgcccaggggggccagttcagagacctactcccaggcgtgcattctctttctcagggatgttccttgctgagaaaaagaattcagcaatatttctcctatttgcttttgaaagaagagaaatatggctctgttccgcccggctcaccggtggtcagagtttaagattatctctcttkttccttaaacattgctgttatcctgttcttttttcaaggtgcccagatttcatattgttcaaacacacatcctctacaatttgtgcagttaatgcaattatcacaaggtcctgaggcgacatgcatcctcctcggcttacgagatgaaaggattaagagattaaagtaaagacaggcataagaaatcacaaaggtattgattgaggaagtgataagtgtccatgaaatcttcacaatttatgtttaaacactgcagtaaagacaggcataagaaattataaaagtattaatttgaggaactaataaatgtccatgaaatcttcacaatccatgttcttctgccatggcttcagccagtccctccgtttggggtccctgacttcttgcaacacttaactgttctgtagggtgtgttagttttattatgatgacctagagtattgataatcagcattctctgagatatttagatgcttaaagtaaaagataaaatgatacaggctgtttgcctgagtcattcataataaaggcatagatactcagagctggaagggaacctcagagatctttgaatcagacaccattctctgtgcaccgcagagaatcatgaggttaaagggacctccaagggccaccagtgcctggaagacctgggatgacgcccagatgcttccactcccagaaagcacatgtattctgttcggatgtgcagtgcctgcatctgtgttttaagactgaatagcaaactgtgttaaacagttataacaaaagttggccatcttcacactgtctttatttagctgctctctgaataaatttgttcaatcctttcatgatcattatttttctcagtgtcaacctgtgtctgctgctgactggtccaaggatattcgaacttgcaagattttaaatgcacagtctttgaatamctggttgattttatgtagcgacagaactgaatatgttgcygagagctttctgaactgcttgagaagagttgcaggttccatgggatttaatgtggactaccccaaaatgtgagaatacattgaattttgttcatatattaatttggtttggttagaaggtagggaataatggcagatgtatcaacaaaagcttctttatcccagtagtttcctaatgtaaagtgccaagaaagtagtcataagtagatagattttgtaatgactaaacttttataaagttagaatatattttatgttggcctttgtaaaacttgtacccagttcttaagcagtagtgtcattacctgaaaatctttccagtaccagttgggatataaatctttaataagtccatatattgtcttctcaactgtttttccttctttcagatcagtttttcatatcagttatttacttaataggaaatggatattaaaaaacagaagttgcatgtcctgacttttacttgattttatgctttaaaatttaatatgaaaatagatctcaaataagcttttctgattctgttactgtagcatactattagtcattcagagagttttctgataagactaaggtcaaccatttattcttagaatgtttattgagtactaatatgtgtagatactatgccagttgctgggaatgagaaagataaataaatagtttttcattgagtaagagatacatatacaatcacactgaaaataaatactgttttgctttagaaaagccataaagttggtcatgcctcattttactgaaactgatatgcttagaaaagaggaacagatacttttctttgttataatggagttattctttaaacacatagttactaattaattgcatcagcagcacaagtattaatcccaaagtctcatttaacaccattgtttagaactctcctcttatcaaatctgttaataaatagcctggattgagtttcacccgctctactttctctaaacccatgagctaataaagcaggaaatgattatgaaagaagccacagtccgcagatcctgggctgacatcacaggctctttctcaygtgaattctggaacaagcccattgctatgttctgtccttggcctgttttatttgaaagctcgtattttatttcaaccttcttttttccatgaagtatccatttacctgttagatttatatgcatagcttctgtcttctaaaacattcacctgatgattttaggagtggactgtaagtgcagcagagtcagagtgcgagagtttgaattggatgagtcaggaccatctagttgctgagacggttcggccagccagtcacataggtctgttagtatctgcagtcatggggttgatggtcctgycacctgctgggcgagttttaaaaagccgctgggcattgggacagttcacttatatacacataaaagargctgattctacataaagaaactagttttacaaattcctatgtgtgtgagaattacttttggagctgctggcccctaacataatgtaagcacagaacagataattgttaagtacttgtgcgctgattaaggctagacattccaggctccagacaagcaaccactaaggaaaataaagatatttttgtctaaatcatgcaaattagctgaatatcttggtctcattaacctgatgttttctgaaacattcatttttagattcctatagcaattcactcttacagaaatcttaatcctggttgagcttgaacactctttcagacatttgatactgtgagacttgggatttcaaaagttcactttcaaccccattttgaacaacagaattattgattatagggattctggacaattgagaagatctgattttctaccaaaccattttttacactgtaaaaattattgcgaaatgtttttgtcatattttgtagtttaagaaacaattttagactcaaaaggttattttctctaataatttttcctaaaactactagtttgttatgaaaatttatttgtattatttctaatgccatataagtatgtgctactaagaaggaagttacatagcttcaaaattaatctttttatgtagcataaaagtacaagaaaatccagctgcatttgttagagctatacagcaatatgttgatcctgatgttcagytggtaagtacaggatactttttgaactcctttaatctataattttagttctgctttatatctacagtctgaacataccctcccatgatatatttgcaaattgccatgcatttctccaaagcaccgaagaaaatattaatcttagtattttaatcaatattttatttcctttccacatttctaatattaattttaaaatacagtacttcttgttacccctataacagccattggtgtctgcatattttgcaactcattggggtcatcttttccttaagatttaagataaactgactcccacctcatcacataaatgttggtatccagtgttccctatatttcaggggattcttggagggttaggtttttccaagtgacctatggccccaaattcctgcttcctgtgaattcttgccaccttctgtgcatttcagagaggaccacttcctccggtgctgcatcacctggtgggacatccacagttgcctcatttcccaaagggcatgtgtgtgtagctgactttgcagactgtttggggccaaggcatgattacatcacatcccaacattccagaaaaattagaattgacatccctgttcttaaaaatctttcaacgattcctatttcccaggaatgtttactcttctaccagacctcagcacccccaggctattgtagggcttttcctgtccattccatctacccttcttacctccctcgctcactcagttcaacatccaacattcttgttgttatgtcatgcaaactaactgaactagctaagtgctatctctttgcttttcttttagtgagtttctcttttactctaaaggatcttatatgaaacagagaattctcaccctaagagcatttattttttacttaaatcaaacttatagaaaagtgacaagaacagtacaaacaactctctcatatacccttcacccagaatcccaaattattgaccttttaccatatttgctttattattttctatcttttttgctgaactatttgagcataagttacaggcatgatgccccagtgcccttgactatttcagtgcatattttctataaacaaggtctctatcttacagaagcatatgacaatcatcaaaattaagaaacagttttcttcatttgtctcaattgtcacctctgtaggaaaaggctctactgtcctgcacttagttgtccagtctctatagtctctccttcaatctggaacagctctttaattttccttgactctgatgaccttccaattttgaagagtacagactagttattttgtataacgtccctcgatttgggtttgtctgatgtctcctcatgattaaattcatgttatgcacttttggcaagagtagcacagcaatgatcctatattctaagtgcatcctaccaggtgtcactccactgtatggtggattatggtgacatctgcccgatttctccactgtaaagttaagctttatcagttgcatgtgtacatatgtagatattttgagactayataaataatcctgttcctcatcaaacttttacccatttgtcttagcatctattataattcttgcctgaatccatcattattatgatggttaacaaatgatagtattccattccatcagtccttctacagttattaggtggcataggaagaactttctcttctccccatttattcrtttgtttctttatatctgcatagactcatagattcctattttgttatagtccattactcttattatttattttgttgctcttaatattgtacctgattttgccagtgggattccccttcaagctggcttctgtgtctttttcatgtgtctccatctttcttggaacactttcttaytttctggcaaaataagatattccaggctcatcttacagtgttgcttccccgccctggaatcagatatctttcccaggagtcctgattccttttagcagagaatagtatttagatacaaagatttggggcacttggtgtgcttcattgctactgggttgttgctatccccaggctttctcaatggacatagctaggaaatgtatgttgcatggctcctgttattccccgcatacctgcttacttgtccagcccctggtgtggaaccagtctcactcggctcccatcttctctcagcccattgggccactgccttgttctaccacttttcttgcttggagccaaactcatgaattggaaggaaggaaggcctctaagagccttttgctgataatttaaaaatatttttcttcactttatataattaaatgtaaataattttagcttttgacattgtgactttaaataattctataggtggaaaaattactttgttttcttctgctaatcattgacartgcatgtcttttctacaatttgggggcttttgaaagtggagaataaaagatgagaaggaggcggaggtaggcccttcagtgcggaaagcatctgataagaagtaggagtaggccaggggcggtggctcacgcctgtaatcccagcactttgggaggccaggccggggtgagtggatcacaaggtcaggcatttgagtccagcctggccaacatagtgaaaccccgtctctactaaaattagaaaaaattagccgggcrtggtggcaggcgcctgtaatcccagctactcgggaggctgaggcacaagaatcgcttgaccccaggaagtggaggttgcagtgagccaagatcgtgccactgcactccagcctgggtgacagtgtgagactctgtctcaaaaaaaaaaaaaaagccaggggacttgaaacttctctatccaccccccactcatatccatactctcaacttcagcttttttttwaaaaagtgtatttttgtgtcctttattttggttatcttgtacctaatgggaaaagcaccatagtttaagctaattctcaactttggcttatctttgggtggggtcagggagggaccaatgggaatgataactcgaaaaccataggaaaggatcactgcaaagttgggggtgagggagtggagatagctggagaagcagctctgtgagaagggaatttgagggaattgacagaatcaaatcaggagagaaatgaggagaaaggaaaagccaagggaaatgggtaggagtgggtggggctttgcagagtgaatggctaatgagaaggcatttcaaatggattgattaattcaccagtgttttaatggccatttaagagaactgtaggcatgttagtgttgcttcttgggaacttaagggtaaaagatgtttggagaataattcatgaattcatttctttaaaaagcaacttcttagcagaagtaaattaacttccaaaatcttttgctgtttttgcttttaggtaatgtgcattctgccttctaatcagaagacctattatgattccattaaaaaatatttgagctcagactgcccagtcccaagccaatgtgtgcttgctcggaccttgaataaacagggcatgatgatgagtatcgccaccaagatcgctatgcagatgacttgcaagctcggaggcgagctgtgggctgtggaaatacctgtaaggaccctgtcacattttttctattagtawttaataaatttattttaaagattaaagtaggagatgttatcacatgatcccagaattatttggtttgcttgtttcttgagcctttgccctgggttctggcattccataagccattgtgaatctccaaaagaggctccatacttctcagggagcttcagttaagctgctaactcagcatagggacctgatttgaatcctcttggctgctattttaaaatctgtgttccattgcctccacatttacttgctttcatcagggtgctaactctgagaatagccttgcaccctggatggggcctccccagagcctggggagctggcatagcctatgacctgaacctccaaactgtggtaggtactgagaaaatcctcttctcttccctgaactgtagccaccatgggagtaagtgaggagaatgagaagtgagggagtgttgcccatttccttacatgtccataaccagaatgaacatggttaccctcagcctccctctctcccactccccacaaaggtgcatagccaagtgaggattccttagagatctgaagaatgaagaatggaattcctcttcagattgctccagaccagaggcaagcgatagatacactgaccacactcccagaatctctttagccactggtgccccttccccaccccacaaaggatgatggttatcttggacggtagtgtttctcttaagataagtgtgtaccatattcttcctgccttctttaagtctctctcatttctggtttaataatctggctcacggatctcaatctcccttacacatagcttaactttaagaattcagtaactggagtctgtttttaaaaactttcctattaaaccattggtaggggaaatgatacctcatcccattaaatcatgacaaatttaattttatagttaaagtccctgatggtggtcggtattgatgtctgtaaagatgcactcagcaaggacgtgatggttgttggatgcgtggccagtgttaaccccagaatcaccaggtactgctaaaactacctgaacacatgcttcatttagttagactattaattgtggtttcactaaagaatgtaacagcaaggaatattttgtattattcactcattttaaacaccaacatttaggttcataaattacacttacatataaaaatgtgattgataatattggggtactatgtagcctcattaaaaaatcttttatatattcattagggtgagctattgctcatcttccccaaatgatagatgtgtacaaattcttgtgcatttatttattttctgagtgtctgcaccatattgggaactgaactaggtactttacatatatcatgtcgagcagttgatctttgaaatcagattgcctggatttataccctggtctgccacttacttactctgtgactgaggtctagttatttaactttgctgtgcctcactatggtaatctgtaaaatagaaataataatgatgactatttcataaggcatttatgggaattatctaaaataaggtgcattgaacatctccacccatagtaaatactcaatacatacttcttgttatgattattaatatttgcagacatttgacrtggctgttgttcagacagctattaaaaacaggcaaaatcagggataatgccttaaacattggctaatagtactcattaaactatgggtcttagaattgtttccacctttgtaattgaacaatrtgttttgagcctatagcagccctttgcaaaatgttttcttcctggcttaagctattttatttactccattaaattcatgatcaggtatgtattttggattgtgggaaacagaaaaaggaacaccataataacaccatacttgcatgcctacaacttcattccaggttgtatgagatgcttcttatatatgccacatcattaatcaagttgataaaggactttcatttttttctttgtatatctaaaatttattttgatatagggagtgaggtagggatccactttagtttttttctgaaatggtcaccatttatcagaaaatttattataatttttatcagttttgataattgatgcatacattatatatattttgaatgtacagtgtgatgttttgatatatgtatacattgtgaaataattaccacagtcaaggtaactaacatatccattacctcacatagttaccatttgtgtgtgtgtgtggtgagactacttaagrtctactctcttagcaaatttcaactatacaatagtacatgataattaactatactcaacatgctgtacattgtgtccaaaacatattcatcttataactgaaagtttgtacccttcaaacaacatcaaatattcctatcctctgcccctgataactatcttctactctctgtttctatgagtttgacattcttagataccacatataagtgatcgtacagtatgtctttttgtgtctggcttattttacttaatataatgtccgtgggttcattcatgttgttgcaaatggcaggattttcttaaggctgaataatattctattgtgtgtgtgtgtgtatatctcacaatttctttacctaaccatccatcagttgtcacaggttgattctatcttggctattgaacatgggaatgtagatatctgacatactgatttcttttcctttggatatatagccagagtgggatttctggatcatatagtagttctacttgaaattttttgaggaacttctttactggtttccataatggctatgctaatttacattcccaccaacaatgtataaaggttcccatttttccacattctccctaatatttatcttctgactttttggtcatagccatcctacaggtgtaaggtgatatctcattgtggttttgatttgcatttccttgatgattagtgatgttgagcaccttttcatgtatctgttggccatttatatgtcatctttggaaaaatgtctatttaattggattttttttctattgaattgtatgggttcttcatatattttggatatcatccccgtatcagatatgtgattgcaaatgttttctcccattatgtaagttgcttttcattttgttaattatttcctttgctatrcagaaacttttattatattgttgtatttttggtgycatattcagaaaatcattgccaagatcaatgtcatggagctttatgttttcttctagaagttttgcagtgtaagatcttttgtttaagtctttaatccatttagagttaatatttgtatatggtataagggtccaatttcgtttttttacatgtgaatatctagttatttcaacaccatttattgaagagactttctttatcccattgtgtattgttggtgtttttgtcaaagattagttgactgtatacgtgtggatttatttctgggcgtcttatcccattccatttgcgtatgtgtcagtttttatggcagtatcaggctgttttgattattatggctttgtaatataatttgaaatcaggaagtgtgatgcatctagctattgatttgcatatgttgaaccatccattcttacatcccaggtataaatcccattttctcatcatttgtgaaacttttaatatactgttgaatttagtttttagtattttgttgaggatttttacatttatgtttatcagggctttccttttttttcacataggcatttattgccataaacttccatcttaaactacttttgctgcatcccataagttttagtatgttgtgtttctatatttcaattttgcagttttcctccattattaattctagtgtcatactatgatggtcagacaatagtaagcttgattgatatagtttgttcaaatattgatatagtttgtcccctccaaaaaatgtgatccccaatgttgaaggtagggcctggtgggaggtgttttggtcatgggggtagattgccctccccatggtaatgagtgagttcttgttctgttagtttgtgcaacagctggcggtttaaaagagcctggcatgtctcttgatctctctcttttgctccctctttcaccrtgtgacaccctggcccccctttgcctttcatgatgattataagcttcctgaggccctcgccagaagcagatgctggcactatgctttatgtacagcttgtaagaccatgcgtcaaataaaccttttttttaaataaattgcccagtctaaagtgtttctttatagcaatacaaaactaacagattgatataatttcagtcttcttaaagttgttaatactggctatgatttgtcttggagaatgttccatgtgtgcttgagcagaatatgtattctgcagttgttggccgaaacattttatatatcagattcatttggtctaaagtataattcaagtccaatgtttccttattaattttctgtcaggatgatctatctgttgttaaaagtggagtactgaagctccctactattattgtattgctgtttctctcttcagatgttaatatttgatttatatatttagatgctcaactattaggtgcatacatacgtaaaattgatgtattctcttaatgaattgattcttttatccttatccmacgactttgawttttgtgaggktttttttttttttttacaaaagtctattttgcctaagtttagctacccctgctctctatkggtttccatttgcatggaatattttttctatccttttactttcaatctatrtgtgtccttacagctgaagtgaatctctttgtaggtggcatttagttaggttttcttttttatccatttagctacactgtgtcatttgattggagaatttaatccatttacatttaaaatattgataagtgatgactcactattgtgattttattcattgttttctggcttttttgtagattgtttctttattcctctctctctgtcttcctttgtgatttgatgattttctgcaatagtatgctttactcctttctcttttttgttttgagtatctactatggatttttgcttcataattaccatgagtcttacataaaacatcttatggttataacagtatattttaagctgataactttatcacatacaaaaactcctcacttttactttctcccctacattttatgttttagatgtcatgatttgcatcttcttatattgtgtatatatgcattaattatattgtgtagctgtttttattaattgtattgttattttcttatgtagctatattttaaaatactttgatcttttatccctacaactagagttataagtagtttataaacaactattacagtattagagtattttgaatttgatgatatacttacctatattagtgagttttatgcttttatatgtttttatgttacttattacatcctttcatttcagcttgaagaactccctttgttatttcttatatggcaggtctaatggtgatgaacttcctcagtttgttgtttgaaaacttctttatctctttttcatttctgaaggacagcttttcaaggaaaagtattcttgatagatcagtagttttttctttcaaaacttggaatatatcatctcattctcctggcctgtaaggtttctgctgagaaatctgctgatagcctatgagggttcctttgtatgtaataagcctctcttcttgctgctttcawcattctctgtctttgatttttgacagtttgattgtaatatgtcttggtgaattcttctttgggttgaacctgcttcagaacttttgagctacgtgtacctggatgttcctatctctttccagattcaagaacattttagccattatttcttgaaataagctttccacctatctctgttctccttttgaaactttcgtaatgcaaatgttagccctctttatggtatcccaaaaactccataggctttcttccatccttttattttttctcctttgtgtattttcaaatgacctatcttcaaattcacagattcttctacctgatcaagtctgctattgatattttctattgcttttatttaattgtattcttcagctccagaatttctgcttggttctttgagatggagtctcacactcacccagggctggagtgcagtggcacaatcttggctctctgcaacctccgcctcctgggttcaagtgattctcctgcctcagcctcccaagtagctgagattataggcacctgccacaatgtccagctaattttttttatttttagtagagagggggtttcactgtgttggtcaggctagtctcaaactcctaacctcctgatccacctgcctcagcctcccaaagtgctgggattataggtgtgaaccaccaggcccagcttgcttggttcttttttaattgtttctatctctatattgaagttattgttttgtttctgtattttttttttaatgtcattgagtggtctgtctgcattcccttgtagcttgctgagcttccttaaacaattattttgaatcctttctcaggcaattcacaaatctccatttctttgaggtcaattactggaatattattgtgttcccttggttgtgtcatagttcctgatttttcttttcttttttttttttttttttcctttttgagatagagtttcgctcttgtcacgcaggctggagtgtggtggtgcgatctcagctcactgaaacctctgcctcccaggttcaactgattctcctgcctcagcctccctagtagctggcattacaggtgcctgccaccatgcccagctaattttgtgtatttttagtagagtcagggtttcaccatgttgggcaggctggtcttgaactcctgacttcaggtgatcctccctcctcggcctctaaaagtgctggggttacaggcatgaaccactgcacccggtcagttcctgatttttcatgtttcttgaagttttgcattgctgtctttgcatttgaagaatcagtcatttcttccagtctttattggctatctttgggagagaaaaacctttaacagtcagcccagctagggattctgaggctctcttacacgttttctattcatgtgcccactccacacttctggttctcacttggtggggggatccttaaaattgcatgcactttctcaatcccacaaagccaggccagctgtcaagaggctctcatctgttttccctagggtggtgccctgaaatgctcattttgtgtaccttctccaaatcctgaagagtcaagctatctgtttgtgtgaaatgcttgcactcaacatctgaacaaatgtggttggggagccagcctggtcaggggtggtggtgagatacatgtagcatttggggtgcctgtgagtcagttgaggtgctccataggcaaggtatcctaagaaacccacaggagggcctcttgatgaagctcatagagcagtcagtagggtttgcagccactctttcctgcccccagactctcctaacctcccagctgtgctgataatcttgttgttctggttgaggcaagaaaaaagtgggcatcctaggcagtatcctgaatgggtgagggagctgggtactcactcactacactctaattttcaccctgtaagagaaatcatgggctgatgtgatctgtcatggcactgagctgtgccctccgtaggggaggagcaatgcaggtaaagtgaatctctttgtgttaccctctttaatgcatccattctctgatgttttactccagtgatgtgctggaacgtcaccattggagttagtctcatccatgggtaattgtcaaaattgatgcttctggaagggaaatgatggtagaaagctcctattcttccaccttgctaatatcactcaggacttctagtttgttggcagcattcctaattgtgttctgttttttttgttttgttgttgttttttacaaaaaaacaaaatgtttagagatggggtcttgctttgttgcccaggctggagtgcagtggctattcacaggcacagtgatagcacaatacagccttgaactcatgggctcaagcagtcctcctacctcagcctcccaagtagctgtgactataggcacgygccaccacatgtagctgtattactgttgttgcatatatttagagaggtataataatgctggaacatacctaacacaaagtcatgatcttcatttccaagtgctttaagttaattaatggtggtagtaagagaacttgtttctgaaatctacacaataatgttaagatttctaatccaaaaggatcacctatagaaatgaaagtttatgcttcagaaatctttgaatattttgacagtagaagctctattgctaaattagtacattaatttataacaataatagtggcctctattactctttactatatgcaaagtactatgctaaatattttacaaatatcatgtgatttaatttttaccacaaccctatgaggtagtaactaatctacttaccttgtaaatctccttggtacagatgaggaaactgagacttaggttcacatagcaaagttacacagctggtgagtatattgactaggatttgaagctcgatatggctgatgccaacactatgtttagcttctgttctcaataaattctttttgggtaaagggtctctttgatataattgtgaacacataacacatacaaaattgcgaacattgatttttactcataatctctgtttcttaatttaatattaatgaatatttatggtagaaaaattgaagttgaattttacttttatttttttttttaactttaggtggttttcccgctgtatccttcagagaacaatgactgatgttgcagattgcttgaaagttttcatgactggtactaaaaatatagcaatgtgggtgggctccaaggactgttccttcagacctcaaatccacatgcttatagaagaccacataggtcagagcaaactctctacacctgtctttgtcaactgtcacccagttgaagatctctgaagctgcatgccgatttaggccaacaatcagactatgtagcatttacatttacatttgtctgtgtgtgataacatgaagccagaaggaaggaaaatttgtggctgctggtttccctgacaagcagtttgaaggtcaaaagaaaccaaccctggaggaactcgagttatgacagagcaatgttaagtgtagacctaggarggaagcctatagggctaggataggggtgctaacagataaagtggcaaagcaagagaagaagggaaagacagcagatgaggaaaggtgccctatccatagcaggatgcaatgcaaagacaaatctaaggtttctgtttcttcaccactcctggcctaggtctggctttgctatttcctagcagtgtgacttgtacaaacccttccctctcctgatctgcattttcccatctgtaaatttgggagtattgtaaatattttttcttaaaaaatgaatttgcttatacatgttggtaatggacttatatatatgattaccttctatcaaactaaaatgaatttcctaaacaataaactcttaaaataactatgcaatatatacatgaaaataattattgcattctattatattcccctcacatcgaaacctggtaaatttttttagcaggtaattttttttttagcagttattaaaggttttcgttgggtagcagttactctatggtccctgttctttaggaaattcatagttacagtgagtagaaatgttttcagagttcattccctcagtgagaattggaatcaaytgggtgagtcagtgtgaagatatrttttcagaggaacagcaaagccatttccttagattttcatatttattctcattaggaaggaaaatgacataaaattagtttatatctaattagaggatttaaagacttgaagacactaatatttgattttaggcatttgtctattgcattaatttttaatttattgcttaaatattaaaattttatttaaagagataggccaagtttaagaatatatcatgccatagaaaccattgtgattccttgaatagcagagacagaggaatgctccctaaagttatccattgttatattcttgcaaatataacccaaattatgtattgccctattttacagtggtctgaaatagcaaayccatttaaacactgcaatatatgggaatgttattttttgttggcattagaaaagtaattcttttcttactgacaccaaattctgcaggagcactcaacaaatggtacaagtacaatcatgatttgccagcacggataattgtgtaccgtgctggtgtaggggatggtcagctgaaaacacttattgaatatgaagtcccacagctgctgagcagtgtggcagaatccagctcaaataccaggtattcaattattgttctttcctccatactcccaattatagcatattcagctgtagctattacacacaaggtattcaagcataagttttgttttttatgcaattaagttttgctgtgtttctgtatcatgccagtagagctctatcatttccttcagattggagggtagttgggatggtctaacataaatagcttgggtggtataagctttgggggccctgggaggggaaacctagacaaagaaaggtaccctcagagcagctgacacagattcagcatgaagcctgcagggctgctggcagtgaaaatacttcatacatattaatatcacatggaagaaaacaaaccgtgatttcaaattcaaggccctaatacacacagaaccaaagcctctgagttgcaggcactgatgtgcacttaaggtctatggaaggttctcaaagggtttgagtgccatgaaagctgagctgcagatggaaatcagaccatcctgaacaccaggcttcttgctccactgttgtctgtgtttcagtacaaaattttctgcagtgattatgtgaaatggcaagttcaagaaaatgttggaaatggaaaataggagaggacaataatctwaagtcagcttcttaaaatatttggaaagcatcttattccaagcaggacacatagccctatctgtagggttacmtcatcatcatcaccatcaaccaaagggtcacagccacaagtcacaaaggagctgagtcttgacctcagtcggttattgttagagtggaggggaagcctgaaagtttggtggcagtatcatctgcagctttatcccaactgttagggccaaaatactttgctctccactgatctcaggtgcatgtgtttattaagaatcacaggtatgcaactgagggatgcaggagtaaatttagcagctgacagtgctaaggagttacttttcttgcactataacatcaacttttgatagtttcaatattgaaaacgttcgtgataaattttaaaaataattataatgcttaaaatgaaactccgcagtgatccttacatcccagaggatgtaaggatgccttttgtaatgacagatattaggatttcgccttggctttaccaaatacattaacacttcaccattcagcatttggccagaacatatatttggtccatccatccatccacccaggcatgagttttgtgtaatacagaagggatgacaagaggaataggaagaacttgtggttcttcctttgctacttggaaataaaattgagaggaagagcgaaggggaaaataggttgagtcactaatcacacacacacacatcttgtctccatggataattctggaaaatctttcgcaaaagtgccagttgaagttcagcattccttcctgccccctttgagtggtataaactaggcaaatgacttgggatagcatccttttgcaacaaatacggacaatccctaatttaaaaaattgtatgtatctctagggaaggagggattgtaggtaatttttattttctgttttgcagtgtttttcaaatggaatttttatttatttcattttttaaattacacaaaaatagaaagctatatagattggattgagttcttttcatattttgcctctctaatttttagctcaagactgtcggtgattgtggtcaggaagaagtgcatgccacgattctttaccgaaatgaaccgcactgtacagaaccccccacttggcactgttgtggattcagaagcaacacgtaacgaatggcaagtgccgctggaaaatcaatttttaacaaaacattcattgcgtccagtttatgtttgaccttattctgtttgccttctttcctacattcattccattttccccctcaggtatgacttttatctgatcagccaggtggcctgccggggaactgttagtcctacctactataatgtcatctatgatgacaacggcttgaagcccgaccatatgcagagacttacattcaaattgtgccacctgtactacaactggccggtgagtgaaagctgtttacttaatgtaaatatgatactcaagagtcccacctaggaattatcatacacgtcatctttgtatccctagatatagcacaatacctgatatttcctaaagaaggaakgaatgaatgaatgaatcaatgaatgaatcacttcttgagtccacagtgggaggaaagcagtctatcatagaaacaaaataacaataactattataatacattaatagttacagtttctagacgactttgttatatacattatcttatgcaaacctgggaggaaatcagggtattgttatttacatgttacagatgaagaaattgaagccaactcagatgtgcctggtggggaagtgttaacaggcctgggtctgccctttgttcctgtgcattaggccaagagctgttcccaaaggccaagcccaaggtttgcacgaagctcctccaaggagttccaaacttgagatcacaggacaaagactagtctgaagtgtgatggctccctactcccagcaccatgaagccagagtgacttttcactccatcctccccagtgagcttaagttcccagtaagttaggttaccttttgttggttgaggttacctgttgtttacccagaagcccattctattatctgtgtaaccagtagacaaagtaaaatcagaaaaaatctctttgaagaacaaggtaatctcttaattatyatcaatacttttttctcctcagggcatagtcagtgtcccagcaccatgtcagtatgctcacaagctgacctttctggtggcacaaagcattcataaagaacccagtctggaattagccaaccatctcttctacctgtgatggcatgaactactggcatcactagatggacaatccaagaagaaattggtatactttgtgcaaatctgccataagctcaaggctgtgactggggaaaaagattgagcttagttttcatgtctaggaaaaaaagcaaaacaacttaatctgaaacagttttaaaaaatgtgtgttattttgttttaaagagttgtatgcttggggtaaattttcattgtcatatgtggaatttaaatataccatcatctacaaagaattccacagagttaaatatcttaagttaaacacttaaaataagtgtttgcgtgatattttgatgacagataaacagagtctaattcccaccccaaattttgctgaggttttcttaatgttgtagagcattttgtagagtggtttaaatagttgaaaataaagttcagaacatcatgtgtttattgttatttgaattttacgttgatattacatgtgaacctcataattgaagtattttcagcaaaacctcttacccactagagcacatcaccattaatctttgagttctatttcggaaactgagctgatcacttgctctcttgatgggactttatttcacttaatagcagcttctcccagtgatgaccttgcttcctatttactgataaaaaggaagctatcagaagagaacttttgcaaacctctcgttatctctaccttcacctaacggcatctgtacccatagactctgcctgcccttccctttattatgagtgcagcatgtctgttcctataaggcgctccacctctgtactaaatctcattccctctgacctgtgaaggatgctgctctagcagttctcccttctcctttctgcatcatcagttttctctctcactactggctcattctcactggcattataaatatgctgttatttctctcatcttaaaaagccatttcctctagcttccaccccattgcctggcacttctttacaggaaaaacatcgcaaaagaagagtctgtgcttgatgtatccaattctgtattccaatcacaatttcaccacaaccactacagcaaacttgccttagtcaacaccaccaataacctccactttgctaaatccaatggtcacctcttggtccttgtcttgcttgacccagtcaatcattttctccctctgagacattctttatttggcctgtagaataacactctcctgatttctctcctactgcatattgatcactcatgctgtctccttttgtggcttttcctcatcttctcacccttttcatgttggaatgccccaggaatgagaatacagctacatgcaaaagatattttgatgagggatagatcagagttcaaattctgcttaccacgggaaggtctgtggaagtctgcaacaaagggtggcaggagagtggcaagtgctctctggggacaagggaagcaggccacaggagggatgccaatgcacaggttacatcactttgcactgaaaatattcttttcctatttgagagttttgtccagacatagtagaaatgcacccaacaggggtctaccaataataggataaccattttgtgaagcatgagggtggaggggacttaataagtttcagggccagtgccatgcctacatatacacatttaatctccacaagaactgtataaattaggttataatgaccatttcagatggtaaagctggggattaaagataccacgtgactcactgaagtttatgagattaataaattgtggagctagaatttgtcctcaggtttgtttgcaaaacctgtaagatgaaccaaaagagtctacacccttgataaaagatactctaagatttaaaaaatttctcccagagcactaatgtgaggtagtgccttatgggatttgaagatggcattatatggcgggcacctgtagtcccagctactcgggaggctgaggcaggagaatggcgtgaacccgggaggcagagcttgcagtgagccgagattgcaccactgcactctagcctgggacgacagagcaaaactctgtctcagaaaaaaaaaaaaaaaaaaaaagatggcattatatagcaagtctttggagacaaggcactgatccaattcaaggtggtgggttttgtttttgtttatcttgttgttttcttccttcaaagtagaacggtgatataaatccccactacctaaccagccagcttgtataaatccacacgaaacattttgattaggcaatacaaccttctgcagagcgcccacccacccttttaagtactgccccaggaaatgacttcttacccctttaacccaccagagggcacacaaggactgctgtgtgaatagagtccttcatcatggcagtgtcataggcttcaacaaacaatttcaggtaaactcctagagggcaacatgggactaagaaatcttcatatgagctctggttccagcacgtttggttgtcagatgtgataacttcactttctgggactcagttacccaatctgtaatatgagagggcttggacaagaccagtggtgcctaatcttgagaagattagaagttcccatgtttaaaagctttagaacaaaaaaatagagatgcctgggtctacctctcaaaatagtgatttaaatggtctgagatggggcctgatcatccgaatattttaaaagttctcgaaatggttctgatgttcagccagggctgaggaatactggtttagataatatatgagacctatttcagcttcacgttatgtgattgccacctctcacatgcattaattagttttccttaggctaccaaggacaaagaggaaagggagcctgtgccaggcttcagagcagcactggatttgaatcctagaaccaccacttatagtcgtgtgacattgggcaagttacttaacctctctgagcctcagtgtatctacttgtaaaaatgtctaacaatgtctgcattgtagagttattgtaaggattagaaatgtcaaatctgaagtatctggccttaataaagggtatcatcttattagacctgaggagaggaaatgaatcaaatggcacaatttagttaacaaatagttatgggtttctattatgtgccaggcactgtactagattctgaattctacaattctacttaagggaaagcttaatattgtctctagaaataaacaatctaccagttcctattttatagaaaggattttgtagtttttcttttattttgagaactgagggagagactctggaagaaagtatactttaaatacatttctgtggccaccatggagtggcccatcagattatcctttaaaagaaccttctgcaaggagcatagttggctgacagcctctaaatgctacagcttcaggatccaccacaggggtgatgttgagaccataccctccccagactgattctagcccattactgagcacaggagaggtaatagatctgggttgtttctgcccaacatgggactccactattagtctctgataggtaatatgctgtgtttagctctgtgtccccacccaaagcttatgttgaattgtaatccccatgtgttggaggagtggcctggtgagaggtgattaaaccatgagggtggattgcccccttgctgttttcatgatagtgagtgagttcttaccatatctcgttgtttgaaaatgtgtagcacttcccccttctctctctctctctctcctgctgccatgtgaagatgtccttgctccctttttggccttctgccatgattgtaagttttttgaggcctccccagccatgcctcctgcacagcctgtggaactgtgagtcaattaaatctcttttctttttcttcataaattacccagtctcaggtagttctttacagcagtgtgagaatagacttaacacagtaggggaacccactttgtcttgaccaaggttttctaagaactgcactaaagttttgagctttttctactgatcctctttccttcccactccgtttcatgtatttcagattagcactgaggtcttaaggccctccctagtcactcctacttcctctcaccagtattcttcacaggtgtttctcccagtaaatcttctgaatgcttaattctgtcttgctgtgtgcttcttaagggacccaaactgacacaactttcttccctattaaatgactctttaccttttaataaaaataagtctatttttaatcttaagcactttatcaaccacaacataaaacatttttaaaaaccttttacctagagatatcataactttttaaatactaggtgtattagtccgttttcacactgctgataaagacatacctgagactgggcaatttatagaaaagaggtttaattggacttacagttccacgtggctggggaagcctcacaatcatggtggaaggcaaggagaagcatgtcaccttacatggatggcagcaggcaaagagagagcttgtgcaggggaacccctctttttaaaaccatcagatctcatgagactttttcactgtcacaagaacagcatgggaaagacttgctcccatgattcaattaccttctattgggtacctcccacaacatgtgggaattcaagataagatttgggtgggaacacagccaaaccatatcattccgcccctggcccctcccaaatttgatatcttcacatttcaaaaccaatcgtgccctcccaacagttccccaaagtctcaactcaattcagcattaactcaaaagtcctcagtccaaagtgtcatacaagacaaggcaagtcccttccgcctatgagccagtaaaatcaaaggcaagttagttacttcctagatacaatggggatacaggcattggataaatacagcctttccaaatgggagaaattggccaaaacaaaggggctacaggccccatgccagtccagaaatccagtggggcagtcagatcttaaagctccaaaatgatctcctttgactccatgtctcacatccaggtcatgttgatgcaagaggtaggttcccacagtcttcagcagctccacccctgtggctttgcagggtaaagcccccctcctgttgcttgcacaggctggcattgtatgcagcttttccaggtgcacagtgcaagctgtggtggatctacaattctagggtctggaggataggatagtggtcctcttctcacagctccactaggcagtgccccagtagggactctgtgtcggggctccaatcccacattttccttctgcactgccctagcagaggttctctgagagccttagccctgcatacaacttctgcctgggcatccaggcatttcaatacaacttctgaaatctaggcagaggttcccaaacctcaatttttgacttctatgcactcacaggctcaatatcacgtgaaagctgccaaggcttgaggcttgcactccctgaagccatggcctgagctctacgttggctcctttcagccacagctggagtgactgggacacagggcaccaagtccctaggctgcagacagcacagggaccctgggcctcacccacaaaaccactttttccttctaggcctccaagactgtgctaggaggggctgtggcaaagatctctggcatgtcctggagacattttccccgttgtcttggtgattaacattcagcttctcattatttacacaaatttctgtagctggcttgaatttttcttcagaaaatgggattttcttttctattgcattgtcaagctgcaaatttttcaaatgtttattctctgtttccctttcaaaactgaatgcctttagcagcacccaactaacctcttgaatgctttgctgcttagaaatttcttccaccagatgccctaaatcatctctctcaagttcaaagttccacaaatctctagggcagggataaaatgccgccagtctctttgctaaatcataacaagagtcacctttgttctagttcccaacaagttcctca

SEQ ID NO: 96769 - DNA, 12159 bp, Homo sapiens
gaaataaaagttcatccctattatatatatctcaaaaagaaaaattccaaatggattaaaaaataaatgtaaaaacaaaaaataaaaataaattaaataaaaaaataaaaacgttgttcttaccccttggttcagcacacttgctgagaacctactatttgcgacacagggttgcagcgactaaggagatgggagggtgagtgcaacagagccctaccccaaagcagctcagaacttcctctctcagctgtgcccaccaaggatggaggctgcatcctgaggacaggctcgtggtcagtcatgtttttgttcttaggaggtaggcctgagaagaacccccacgccctgcccagatcagctgacagaagatgctggcaacagctgcaggcccagggcaagcacgttctgttctcacttctctcccggccttcctctatcacaaccttcaaactcatgacttctgtattctgaaccatcacttgttcgcatgatgtcacctatgccaggcatttaggaaataccgtccaggacaggtgacctccttaaatggagaaatcctcatttaaaaacagccctggcaggccgggcacggtggcacatgtctataatcccagcactttgggaggcccaggtgggtggatcacttgaggtcaggagtttgagagcagccaacatgacgaaaaccccatttctaccaaaaatacaaaaattagtcggatgtggtggtgggcgcctgtaatcctagctacttgggaggctaaggtaggggaatcccttgaacccgggaggcagaggttgcagtgagaggagatcacaccactgtactccagcctgggcaacaaagcgagactctgtctcaaaaaaataataaaataaatacataaataaaaacagagacaaggcctctggtcttatttatgtggaattatcttacttgcccatcttaatggcagcttggaagctgatttagggatctcttttttttttctttcccctgactcaatttattagcaatagcataacattttttttttaactttgtttaaaaaaagtgcttctgttcacatatccaccagtctgtgccctccagtttctgtttctgctgctctggacattaactccgaagagctgccaattttctcagaagagatttaaataaacttctgaagccaaaggagtaattttctttataattgacattaaaaagtcacatgaactagatgaaggatggcggttaagcacatctgccactgggcattgtcttaaacttaagaataatcaatggcaaaagggaagaaaaggtttattggccaatcctcaaaactagggaataattaaatacagttgcacataaataagaatataaatagaaacgtttcttattcaattacttagaaacccagaggaagatgtgggcatgcagactattcatcagcaacagacttcactttctgtgaggtgtacctgcccatctccagagataatgaatggtttcttcattagacttcttgcaatgattaggtcttatttacatgactttctttgaatgagctcaaagcggagtcaggaacctgaaattcactgttctgaaaacacctaggattaactcattcactgcacaagctacttaacgagttcctgttatgtatcatttagctacagagaacacaagtgggtgaataagagaagtggggctgagccgaaagggccccggggagaggagcccacagaagaaggtctaggactcacctccacggctcggggaggtggagggtcgaggaggccaggaggtggcaggctcagcggagacgttaaaggcactagacagggaggggaagacaggactagccccttccagattcacactggctgcctggcagagaactggccagagggagccaggacagctgcccaggccaggcaggaagttttggagacaccagcaagattctgtacttgatcatcagtaaccaaaactaagcagtcttgttcaagtcattacatgctcccattaaagctgcgaaagtgttcttgtccatcatcacaattcatacatttgacacatatggcatatttaaaaatcagcaaatcttgcatgtttatctgactttcaatcacctgcttccaattaagctgaccaacgacattggctcaatctcctcacagaacattctggaaacctttatgtgatgccactgtcacaggtttaccaggacaggcactcaaaagcttttcccacgtagaatttcatcagctactcgggcctgtcatagaactgtagcatcacatcaagatgcaaatcgcttagaaagaatctggttcctccagcaagttctaggaggatggcatttggatctcccggatgtctctcgccatgaactgcaatttttacaaatccaggtgagaaatctaagaattcctaacatttatacagaattctgcatttcctcctggctggtgatgttgaaccatgagaaaggtgtccttgtgacatggatctgtctcagggctttggagcataacaaaagtcttggggaacctcctttcctgtggatgtctctaaatgagctaggtggtgctcatctcaacttcaaggctccattctgatttttgtgttttcttcctttttcctttcaatgctgttggctggtgtagttaccacatacacaatcacttacgtgtattcacagactttattagatgtttaagaaattatgagatttgaaaacacacagaaaagatatcttttgagaagtgtccaatttggagaggatttgtatttgtggaaaaagaaagttggtctcacgcacatacaaggctgacaaattttcccatagccagagaccctccctgactaccacgtgctgggatggcccccctgcatctccctctatccccaattaatgtggaactaattcgtatttcaaacttcccatcagccagtctgaacccagagtcttcggcagttatatttcttcacaatgcttgatttatgcacccaaactctccaacccacaaatacaacactaaaaaatgcagaccagggatggaaatttgcaagtacacttgctcattccacactaggtgaagtggtttagatagctgtcgctaacaccaaggggtttattaataggcaaaaattaattgtatgtagactgaattaatgagatggaaaaacatgcatatttcagcaaatacagaggggaccagcctctgccgaggcatctgtaatgaagtgtctgggctgtgggatgagtggggagcagctaccagcaagccagggtccttttgtgatgatgggggctggaggtactgttaaaaaaatacactgtgaaatgtaaacatcaggcaactgttttgagcacaaagttgacccctgacacatcttctgcagactgccatctacagatttataaataaatgattagatgtaaaatctccagagggctttccttttccacagcaattataggagcagattattaccattcaagtggggttccagggaaagttccttgactggcaggaatcactcactgctgtcctcctgtcttaagtcatcatgacaggaaacccagtgttcacatgtactgtgaacatttcaacaagccaagtcaatatacactgaatgaacacattcttgagttaaaatatattactgtcaataagaggctgaattaagaaagtatgaagtttcaactgtgatcaacgtcaggaagttttccatatttcatggctgcacgttgttaaaagctgccatgtgtatggacgcctagcactcacccgggcattttctctttggctattcttaaccaattttttatgttgttcaaatactaggtaatgaggctaatcaaagaaccatcaaatgaacagtatcaagttcagccacatttttccagcctaagagtttcctttctttcctaaatttcagggggaatatcaccttttggctttagggctcactttcattacaagaatgctgcccccgtactcctacgcaggcacttgcactggaaatgggttttccaagactcacagcagcaaagccaacgccattccctgctctcttgtccattttctctttttaaaaatgggtatgggctgggcgtggtggctcacgcctgtaatcccggcacttagggaggccgaggctggtggatcacttgaggtcaggagtttgaggccagcctggccaacatggtgaaaccccatctgtaccaaaaatatgaaaattagccggacatggtggcgtgcgcctataatcccagctacttgggaggctgaggcaggagaatcgcttgaacccgggagatgaagtttgcaatgagccaagactgcgccactgcactccagcctgagtgacagagtgaaactccgtctcaaaaacaacaaaaaactggtatgtaaaaggcacaaatttttttaaactttatagtttgaaattgaagattcacaagaaaaatattagtgacagttcccaggcaccttcattcagcttaactttctacataatcatgcgttaccaaaaccaggaagctggcattgatacaatacatctaactaaactacctatcttatttgatgtcaccagtttttacaaacattttaaattcttatgtatttttatttttaatggacttttaaaaattatgttttaaaatgaaattttataatgtgtttagatttacatgcacaaaaccccagacaggatactgaactgtctcatcacaaagacacctgtcaggctacacctacgaagtcatctgtccccagtctctgttaacccttatctcttccccatcactgcttgtcatttcaagagtgttacatacaaaaaaaatcctatcttttaggattagcttcctttactccacctaatgccctttagatccatccaaattgtaccgtgtatcaatagttggctgctttttattctgttttcataagtattccattgtatggatagaccacagtttgctttttctttcatctttggaaggacatctgaattgcttccaatttgggggtcactacaaataaagttgacatggacacttgtgtacagtttttgtgtggacataagttttcctttctttaggatacaagagcagaagtacaacttccggttcctgtggaaacagatgcttaactttctgggaagtggccacgtggtctccgagtggctgtaggagtgtgtggtctctgcgtggaacctcactgaggctctgatttgcatttctctgttggctaacaataaacattgtttcctgtgcttatggtcctacgtatctcctcttggatgaagtctctgttcagattgtttgtccaatttctagctggaatgtttattttcttatttttgagtttagagagttggtttcatgttctgaatacaactcctctgtcagatatgggatttgcaaatacagttgttcctcggtatatgctggtgagtgcctccaggatttcatggatacaaaaatctgcacctacacaagtcctacaatcagccctgtagattctgtgtatatgaaaagctggccctccatatacacggttttcatatcctgtgaacactatatttccatccacatttggttgaaaaaaatccacatgtaagtggacccacagagttcaagtctgtgttgttcaaaggtcaatggtattttctcctgggctgacttgtctctgttctctttttacaagaccttttgcagagcaaaagtttaggaacagaattttttaaaaatattgatccttctggaattctcctgctctgacaagtttccaggatgagtgatctctcttatagctgaagagtcaccttggccgtctttcagcagaggtagccaggaccatgggcgtccccacaggaagcatggtctctatgggacggaaacatggcgtgctgctgagccatactaaggaaaacgtgattcacatgagaaatacactatatatcatcatggcatttaaaatgtcattttccttaccagctcaaatgaatatttacagtgccacagcggggcacacgtgtggagtgacatggaagtgtcccagtccacagcgcacccggtgctayggccacaggtggagaccatcggacgacaacgcygcctgcatggtgcttcctgtccagcacaggagacagacaggtagcagccggcgctccagtgttaggccacaggacacaaagcagggccacagcacaggcagcactggtggtgggagcagtttcagagggaaattcaggatggcagctaccacattgtctcagtacaaggactgccagcagcattgcatggtggcgacgctttactgatggggtcgctcaggaagcacgcacaggcagcgtccacacagcgtgcccaaggcccctgtggggaggcatcagacacggccggcacccacatctaccctcacggagtggcgatggcgctgggcacaaggggccacaggcacacgggggaagcagcagccacgtccccacgggggcaaaggagggtcagggaaggcttcccagagcgggtacctgaggaaatacctgacgactggttaaaggagcgggaggcggagaaggcgggggccagtgtttcagatccaggggagagcatgctccaaagtcggtagaattcctgaaccttcctgaatcttcccttccacgcctggatgtcttaaggagtggtgggtggataagacgggggccagtgtttcagatccgggggagagcatgctccaaagtcggtagaattcctgaaccttcctgagtctgcctttccatgcctgcatgtctcagtgctggcgggtaaccaaatacagatgcctaggagaaggtggtttctcctctcaacaatttccacaacccactgcagcgctggaaagggggctttattacaacacaactacaatctagcacgggatccccaaaatcatgcccgcgaaataaaatctgaactcaggctgacctgtgtgccaggagattttaactagcttgtcttggctttcctcagcttgtacaattcaccaaccttaatgaaaattcacagaaaagtctacaagtcatacagtcggttaaaaaaacctcttccttgtactacaatagcatgtgatcgctgtcacaaatcgataggatatgaacgagaggaatgtatggggtctgcgactgctgggctcgttggccactgaattgcaccattgtacagcactcgcctgtctttcctttctaaatcgaagacattttccagcctctacacttaaactatgggattaggatcagaatggtataacggagcgtggaatgatctgttcagtcacagtaattttggaaaaattccttttaattttgtgacatttttgtattcccatgaagtacataggagttctctctataactataaaaatgatgtgttgtctggtatatgcgacacttctgactggaacttgcaaaggaaggcattaggtttgttttctatgactaatttttttgtttcaatggcatcgaggtaagataagatggctgtaagtcctcaatgcaccaatgctgaataaaaaataaaatctttcattaaaggataaaagtagagcctggatttgtttgctgaatgttaacacctaacataaaaataccccacagcacgtcccgacatcaggcttcctaaaggatatcctattacttcattcaagacagaaacttttaataaatattgtactaatattcttaattacatacatttccattgaaacataccaacatttctcaagctgtgctttgcgggtccctggagtcacatgggctgcctcatgtgtttgtgaaaaaaacgctctttggtcaagtaatattgtgaaacaccgggactcagacctcatgccagttgtggaagcccgcagggtcccacagcgactcggacctcacgccagttctggaagcccgcagggtcccacagcagaggggaccggtgtttccccaatcactttgttcctagaaccctcaagcacacaaggaccgcataaattttggggaatagataaaaagtatgaaatttaatcaaatcaagttttctaagaaaacacattaatctgaactgcttgcttgtaagagcttagaataaaatcttgtaatcctatgactaacatttacttcctatcaagaatatcacgattcttttttttttttttgagatggagtctcagtctgtcatccaggctggagagcaatggcatgatcttggctcactgcaacctctgcctcctgggttcaagcgatcctcccacctcagcctcccgagtagctgggattacaggtgtgcaccaccacgctcggcgagtttttgtatttttagtagagacagggttttgccatgttggccgggactggtctcgaactcccgacttcaagtgatctacccacctcggcctcccaaagtgctgggaccacaggcatgagccaccatgcccggctcttcctaacagtcccttatggcttagcaccacatgcactggaccaagtctacacccggtgcacacgtagcatagtggatcctgtgtcattaaaacattagggagtggatttcgccccaggcactgagggtttggttacattttttacatgcagtttagggttcaagataaataacttacagtgtgtctcctacagtctcaaccaaaggatgtattttcccagggaagacgcttgtttagtaggttaaaagtctttcctgctgcctgaggtaactggaggtgatgcatgctttctaacacagcccctccaagaggcagaagcagctacacaagcttggcaaaatgcggcagggagtcacccagccctggcagccctccaatctgcaccagcaacagcatcgggcacttgttcctgctcagagaaggaaacccagccagggcagcggggcctggaaaagtgtccctgacagcagccctggcaagctcctgcacctgcaggaactgaaagtgcagaaacaaaggcagccaccactggtggcttcattctgagcttggagacacagtactcatcactccaggcctccaaaacaggggccccaaagtcctttctctctccagcttgaaatcagaaataatgtttcctgcatggagccaccgaggcgttctttccttgagcctcctcttttcagttttacgcccagccttcccgagaggagcgtttctggacaatgatgaaggacgatgccaggcagccctccagagttactgtggactcggcattcacaatctgtcaaggtaactttatgacctcatggctggctggtgtaattccagtaatgacctacagacaccaaaacaatctaaacttatcaccgctcctcttatggccaacaaccggcctcatcaaaaagctgaagggcagtgctgctggtggggacagagatgcccccggaacctggcctgattcttggtggtgctggcagtggcctcggtgacctgttccttcgcccccggctggcccacacccttcacctgctcagggctttgtggggggcagtccgatcacagccagtacctcctcccagcagacagagcacttcgctgggctgtgcgccctgactagtgttagagcagggacgaggaggcaggcaggtgttgagctggcctgtcaggtggggacatggtgggggcagaggcactgcttacaaacagactgggtgaaagacaggccctcaactccaggttacatgggatttttcagatctggacattacccaggcacctgctatggcttccctttagagaaacagagagatgaggcatggctgcgaaaacctgaggttggctattctctacagggcagagatgaatacagaagttagggacctgctgatttatggtaaccttgggaattaggaaagcttaaatgtgttagcataggccaactcaggtcaagctagaaataaaatggtattacataaaatcattaaaaataattataaataatagaaaatgcttataaataatataagacaatttaaatcacaaaggcaaaagacataaaacactataaagctgaaaatgaaaatatgtgcattaaaattgtctttaaaaaaaaaaacacatgtgtttcatgtaaatcaactcctatcagtcttcagcacaagggcctgtcatttcccttggcccatcagagacacccacataccacatgcccaggctgcagaatcagccgctttgcccctggatggttactactagcacgctgatggtggaaatggctttggcatcccaacttagctatgggtaagatggtcaccatttcagatttactgaaataaggaccttgaggactccaattaataactctgctttttcaatgtttttttttccaaaagaaaaatacactcataatgcccagtatctgtgatttactgctttatgctatacagaattctctgtgctaaaaaagtaaagtatatgaggtcattttacttctaaaatctaaatgtaatgtatgtatctgcttgcatatttaccaagaaattcccaatgagatagaaaatttcatttcctcatgtgctttttctgcagaacaatcattcttaatggtttcttttatttaaaagaatccatttatcaatttaaaagtgattataattatcaaatggttattttttattaaacagactgttcttccagctgcaggctccatgtcacgtgcagagcctggtgtggcccaacccctgcaaacacgtcgtcttgctgatctcagccacttccacagggaccctcgcagagtacgccgcagagacgcagagatgcacctcttcacagaagaacactggccagagggagagggtccactgcgcttgctctgccatgagcccttctccccgcagtcatccccatggccccagcgctgttgccatcaacctgtatgttcacagaaggaactggtgggtgccgcccacaccgagcctggccaaccatgacagcggccaaagtgtcccattaccaaggaaatgaaggtcggggggcggccacagggaagaggaagtgaaggaggctcagtaacatccggcccaatgccctggggaaaggcgggggtgagtccagccttgccttccattgattcacgcacaggatggtggcttcaccccgactccccatctgggtgtgggacggccactcctgggagttacaggagaggtagggtgcaccctgctcagccaatggagccccttccctccctcactcacatgtgctcatgagagcccggcgcagtgccaggtagcagctactcaatggtgacacatggccgggaccttgcagaggccacaactgagcagcgcctgcccctgaaatccaccaggttttgatttaaggaaaagggacctggtgggtgttgtgaggagggggtggtggctgccacagggaaatgggctctggcaccctttttcccgatggttccaccagcctctgtcaccacggcctgctcccttggcgacaccacctactgggtctttctctcttctccctgatgctctcacccaaggagatcacagcagcagcagtgggtgtgtggctctcaggccatatctctgacacatgctgcttctctgagctccatgcctgcatgctcacggatccgacccactggttccctggacctcaacaagagcaggcccaaggttgaagcgttgttcccgccactcctggcttcctgctctgtttccccttctgatggggactcccctcctgctagtcacacatgccagcaacacgggcccacgcctgccttatcctcctctttggccctatttaatcacaaagtcctcgttttcactcctaactcttccggcaatctgtccacttacagacgtcactgctgtcatccttctactagtctaaacccagtcattccctgcctagaccaccatgatggtccagtaactggcctgcctgcatctgcctaacctctccaaatccaatgtgctcaccacactacagccagggtgaggactcgagacgaaactcctctggttgcccgtggcttctccatccaaatggcctcctgacaccctctcaaacctcccagtgtgctgggcccttgctcccgcctggccctcagctgggtcctctgtcctgctgctttgcacggcaagcacacaggtcctcctcgggtcccccaagtgc

SEQ ID NO: 96770 - DNA, 14803 bp, Homo sapiens
gtagctgagactataggcatgtgccaccaggcccaactaatttttgtatttttaatagagatggggttttgccatgttggctaggcttgtctcaaactcctgatgtcaagtgacccacccacttcagcctctcaaagtgctgggattacaggcaaccgtccaggagaaccacctctacaaaaaatttaaaaattagccggacgtggtggcaacacctgtaatgtattccagctacttgggaggctgaggtaggaggatcacttgagctcaggaggtcaaggctgcagtgagccatgatcagaacactgcactccaggctgggcaacacagcaagatcctgtctttaaaaaaaaaaaaaaaaaaaaaaagctgggcacggtggctcatgcctataatcccagcactttgggaggccgaggcgggcagatcatgaggtcaggagatcaagaccatcctggctaacacagtcaaacctcatctctactaaaaatacaaacaattagccgggtgtggtggcgggcgcctgtagtcccagctactcaggaggctgaagcaagagaatcgcttgaacctgggaggcagaggttgcagtgacctgagatcatgccactgcactccagcctgggcaacagggcaacagagtgagactccatctcaaaaaggaaaaaaaaaaaaaaaaggccaggcactgtagctcaagcctgtaatcccagcactttgagaggcccaggaaggcagactgcttgagctcagtagttcaagatggctctgggcaactcgagaaaccctgtctctacaaaaaaaatacgaaaagtagtcaggcatggtggttcgtgcctacagttccagctacttgggaggcagaggttgcagtgaaccaagatcgcaccactgcactctggcctggtcaacagagcaagactaggtctcaaaaaaaaaaaagaaagaaagaaaagaaaagaaacgaaacaaggccttttcttcagcctgagacagaacaaacctccatggctcacacagctcactaacacatggcctcggccccattaatacctatttctgatgaaaactagccaagctgccacatgagtgacagagggcactcccttccctaagccccatctctgtcctcaccccctctggggtgcttcagatctattaataggttgaaggggcagagaaagggagaggcacaatggctcatgcctataatgctagcactttgcgaggctgaggtgggaggatcacttaaggccaagagtttgagacctgcccaggcaacacagtaagaccctgtctctaccaaaaaaaaaaaaagaaaaaagaaaacaaacaaacagaggcagaaacaggatgaagggatacagcaggtagctaacagcaccaagaatcaccaaggacttacgcacccaggttctgggcacatagtgaaaagcattaaggactacattagttctcttgacttttattaaattatcacttgaaacgcgccaagaagaacatgtacctattatttaaaggagaccaacaacctcatgaatacactgaaaaccactaattgtatattttgaaatggtgacttttatgctacgtgaatatcacgtttaaaatgttacttaaaaaaaaaaaaaagaaaagcagtgtcatatttaatattatacctgagttccaatactccagtaaaaccacccgacgtaagaaggatgccgaaaccaagcgtacactccactggtcaccagagtatgtgtatctgatttttcattctgtaccacgtggttgaaattggagccagctgtaaacatggccgccttcctcagacattctccgaagaccaccatcagcagccctgtgacactgagccaggtaatctgcttcagttctgtgggagagagacatcaacgacacacggggagtgaaaacactggcctgagctccccttcgcactgcttaaaattaacctattttcccgaagacagaaacagaaaatgtgctgctgggcaatcagcatttgtcatcacattaaaatttcataagaaaacacattcccctaagttatgctgttcatcaatttactttaaaacaccaataagcacaatgaaagcatcatggtaaagagatgctctcctgctacagctgatgggctctctggttcacgacccccggccacatgctcagtccttcatctggggacaagtatagctaagagaagcaaaaaagggtccaaggtttccaccctgaatcccaggagccacatgtatttcatttcattggctgtgagacattcaatttcagagtgcattccacatacggaggcttttattttttgagacggagtttcactctcattgcccaggctggagtgcaatggcacaatctcagctcactgcaacctccatctcctgggttcaagcaattctcctgcctcagcctcccaagtagctagaattacaggcatgcactaccaggcccggctaattttgtatttttcgtagagacggggttttaccatgctggtcaggctggtttcaaactcctgacctcatgtgatccacccacctcggcctcccaaagtgctgggattaaaggcgtgagccactgcacccgaccttgttagtaaactctttttttttttttgagatgggagtctcgctctgtcacccaggctggagtgcagtggcgcgatcacggctcactgcaacctccgcctcccggattcaagcagttctcctgcctcagcctcccgagtagctgggattacaggcatgtgccactacgcctggcttttttgtatttttagtagagacggggtttcaccatattggccaggctggtctcgaactcctgaccttgtgatccacccgcctcgacctcccaaagtgctgggattacaggcgttcgccaccgtgcccggccagtaaactcttacatgaaacgtctaaatatcatctgattataaaattagaatcacaactactcaaggttggggcttcaaattagatggtgcactatgtgatgcaaactttaaagcaaaaggtcagcacgtcctcgagtcaatatccagaggcagaattcatgagcggagctcatcctttataaatagcttagtgaggatagaggtctgcggaaaatcgcttgggggagattagacctgaaaggtgaatcaatgtcactgtcctcagcctgaatgggagccacccttttcccctccagagggggacataaggcacacgaacctggccaaaagatattttcaagtgtgaactctaaccaagaagaaagagcagctactgtatactccaggctgtgattcaggagaaaggaatccaaggacagacttttgggattattgactgctgtcaccaagtattcagaatagtggaacaatgacagggagcacatgtacctatttaaagacaaaaagagagttaagttgggacaagagaaccaagttaaccataagtgcacatctgggtctcctgagctgtccctaagtctatgaggccctgttctcacctgtctgagagtggacacaggtacccatctgcagcatctactacctcaggtttgcaaaaagtggagtttttaaggggctgtttttgtttctggtgttttgttttgttttgtttgagacagagtctcgctgtgtcgcccaggctggaatgcaactgcgtgatctcagctcactgcaacctccgcctcccaggttcaagcgattctcctgcctcagcctctcaagtagctcagactacaggtgcccaccaccacgcccagttcatttttgtatttttagtagagacagggtttcgctatgttggcaaggctggtctcgaactcctggcttggccaggctggtcttgaactcctgacctcgtgatctgcccacctcggcctcctaaagtgctgggattacaggcgtgagccaccgcgcccggcaagggactgtttttgaatgtcacaggcaaaacaaacccataggtcacagaggcattatgggcccttctgtccgttaaaaatgacactacacacaataaaacatgaaagagggagataacaacataaaggagtgatgtatgtcggatacaaaatttaacaaaactgaaataattccggcaaagaaggattagatggctcaaaatattgataagaggagataaaactttttaccttgaagccactggttcatatccaggtcagactagaaggctcaagggactgaaatcatagtgtagggaaaaatcctacagtggctgtggggatgcactagatgtgacctaatagaaattagagatgaaaaaggcccatgaagacaagccagagccctgcccctgcccgccaccgaggacctgcaccccttccgggaagggctgctcaagttacggaatgctgtcaccacagctgcggatgacagcacctttgggggtgccagggagatctgtttctgcctgattcacaatcaacccacaggcacgaaatcacaagggctgaaatgtgagcaactagggggaagccaggagacttcgtttccagagaaccctgaacagccttctgccggtcacagatgagacagggatgaggaaatgccgctacagaccctctgatctgtccaccctcgcctgaaaaccagtatttccgaaggaattcttaccagccaaagtgactccaagaagactggctaaaacttagcagcgtgccgcagccgaacacaaaccccaggaaacaagctcggatggctatctgaaaggaacccaagagaagctcagtcattcacagtcctcagagtacagatctgggctgctgaccttcccggaataggcaacccacaggcaagcagatagagccgatttgctgaggttgaaagggagaagtgggcgacctgggttcaaattctgcacccaccgctctctggctgtgtggcctcccaaattatttaacctctctgagcttgcttccccatctacagccaggggataacagtacctaccttttaggactgcagtaaggattacccacgtaaaacacttaagactaactgctacctacattttagctgtcattattattattattcgtgattactattcagggctgtaggaaaactgcttaagcctagtttatgaggtcagggcacccgggcctgtgcgcccagccccacccacgtcactgcggggcctttgacctgagacagggcagcaggtaggtctctgcaccttaagttacataaaagcactcgcgggctcgctcactccaccccacgcgcacctgctgagctgcacaagctgcaatttaacaacccactcctcgggtgcagggcgcccgagcccggagagagagggtcccctcctgcgacctgaactcgcggatgaagagcgcgcgcgtgggaggccactgcgggcccggggagaaaggtgcccacgcgccgcgccaagcggaccgccgcccgccccgccggcccccgccggcccccgccggcctgcacctggtagcgaggcggccgatagagcagcagcagcagcgcgttgagcccggccacgtagagcgccagcccggtgcggccctgcaggccggcgcgcgtgagcagcggcagcgcgagcaccgaggcgcccagcaggaaggtggcgaggctgagacgcgcctcagagcccggcggagcccgcgccgcgcagcccgccatggcgccgggcggcggactagcgggcggcggcgccggctgtagcccggagaaacgcgccggctgcgcctgcgcactgtgccgccgatgccggcccgggaagggcagctgcccgcagctgcgcgccgcctgccagttctcgcgagaactccggcccgccctgttgctgtccggaatttggcgggagcgccccgcccgcccgcccctccccgcccctcggggacatccgggctctgagccagactctgtgccgggcgggggccgggaagtggtgggagaagtcgccgcccgcgtctgtccaaacttagtcccaaactcaggaggttcctgtcccaagaagcaatgtaaagtttgaaacgagccgagcgcggtggctcacgcctgtaatcccagcactttgggaggccgaggctggcgaatcatttgaggtcaggagttcgagaccaacctgggcaacatggggaaacgccgtctatactaaaaatacaaaaattagctgggcgtggtggcgcacgcctttaaccccagctacttggtgaggctgaggcaggagaatcgcttgatccggggagacggaggttgcagtgagccgagattgtgtcactgcactccagcctgggtgacagagtgacactccatctcaaaaaaaaaaattttgaaacggccgcaccctcgccggccctgcgtcgtccccgaaaaccagacgccctggggcgcggggccaagtgcggcgacctcctgccctccctctgcggctccctggaaaccggcctggacaacggcacctgggcatccatgcaacgggaccaccgcccgcttaaattcctgttgtggaacaaggctggacggtgatgggaatgctcaggatatgttaggttttcttttttttttgagacggagtctcgctctgtcgcccaggctggagtgcagtggtgcgatctcggctcactgcaagctccgcctcccgggttcacgccattctcctgtctcagcctcccgagtagctgggactacaggcgcccgccactgcgcccgtcttatttttttgtatttttagtagagacggggtttcaccgtgttagccgggatccatctcctgacttcgtgatccgcccgcttcggcctcccaaagtgctgagattacagacgtgagccaccgcgccctgcctatattaggtttttaaatagcaggaggcaaagcttttcggtgtgatcctgacttcacttggggaaaaagggcaggtatctgagcctgggaaaatgatcaagctatcagccaaaatggtataacgccgactatatatgtaccttttttttttctttttttcttttttagacacagggtctcactgtgttggccaggctggagtgcggcagtctggaactcctgggcccaagtgatcctccaatcagcctcacaaagcactggaattacaggtatgagccaccacccctggcctatctttaggtagtggcactcttggtgatttttattgtctttatctgtttttgcagtttccatactgcctacaatgaacacaggatactttttttttttcagatggagttttgctcttgttgcccaggctggagtacaatggcgcaatctcggctcactgcaacctccgcctccgggttcaagtgattctcctgcctcagcctcctgagtagctgggattacaggagcctactaccacggccagctaatttttttgtatttttagtagagacggggctttaccatgttggccaggctggtttcaaactcctgacctcaggtgatccacccgcctcggcctcccaaactgctgggattataggcatgagccaccgtgcccggcccatagattacttttataatcaagtttttctttactttttaaagagtaaattctctcacctcargtagctcagagagctgcgctggaggagaaaagccagtaagtgaacaactggaataaactctgcaggggtggcagtgggggcagaaggagagcaaggatggggagcaaagagggaccccaggggaggccctcagcttggagggcggcagggcgaggaggctgcgaggaacagacgccagagctaggccttggggcccttggggatggacagcctgccctccattggaaatgagatcaaggagggagtgagggcttggcgtttgaaaggcacagaggcgggagggagaaaggctgagaagggatggggacaggccctcggggaggctggcatcaagtggtgggtcagcgagagaggcaggcggtctgtgagccctgcatctgagcccctctccactcttgtccctgcaggtcctggcaggagctctggtacctrggaagctggatggagagcctgggccagaatcccggacccctcacctctgcggcctagctttgtgaccttggcaaatccattctatgcacctccatttcctgtacagtggggatccttatttctctggcacagattggtatttgttctgtaaagcccagtaccactttattttattttagttattgatttttttgagacagggcctcactctgttgccaaggctggaatgcagtggcgagatcatagctcactgcagcctcaaactcctgggctcaggccatcctcctgcctcggcctcctgagtagctgggacgacaggcgtgcaccactgcgcctagctccagtaccatgtttaaacggtgctcagaaaacgtgctaaacttggtggatgggaattgaaaagagatttaatgttttaaaaatcaaagtcactcagctgcagtgccacatgggaaggaggcctggatgtgaatgttcctgggagctgagagctcctgtgactgtcgccagtttcctgtggtctcccacagactcaggacatctccctctgctccaggacacctcaggaccaccagagggcactcatcgcaccttcacccctggaagggagctggtcctggggccaaaacccactgtgcctgggaagcccttcctggcttctgctctcctcaatgtatgacagccctgatttacccccagggactgttgccactcggggttgtagagtaatatgtaaccagactggagaaccacagcaatgctctctcctctgcccatcacctccccttgkcccctccctcttcatcagccccattttggagaagggagaaagaagggagaggcagcagtctcctcccaggtggggccggactccagggaaggagaattttcagaagttgctggagttgccgaatctgtcagggcccagggttcacagagcagtgatggaggagaaaggagaggaagcagatctaagcacacatgggcatcaaaccagaggaacaaagtcacatgcagagggctgcacatagacacagggaaacacacacacggagatgcacagaaacacgcagaccccatgcagggacctgctttcccgccacagaggaaagcaatctgatcaaacagacccactgtgcacccagccctccatgcttggggacaacacacctacaaaaatataagaaaaaaaaggaaaactgctctgcctgggatgccttgcttgacttttcttgtaaataagcatttgaatgtgttttgttctaggagctttcgaggcaggcacaaagggagccctttctcatgcaggaaggtccctctgcaacctcccccttccctccccttcctgccatccgcctacaggctgaggtggctttatttctgggacccgagtgtggatacctcctgttttagagaaccctgagaaccactgtgctatttccaagttaaactccaggccgagatgaaattaggcttctttttctttctcttttttttttttttttttgagatggagtctcactctgttgcccaggctggaatgcagtggcacgatcccagctcactgcaacctctgcctcctgggttcaagcgattctcctgcctcaccctcccgagtagttgggattacaggcacctgccaccacacccagctaatttttgtatttttagtagagacggggtttcaccatgttggccaggctggtctcgaacacctgaccgcgtgatccgctggcctcggcctcccaaagtgctgagattacaggagtgagccaccatgcctggccagattggtgattttttttaatcacctgcagctcccagtcattcacaggcctctgccccatcccctgtccatatggaagctgagagggccgcagggaggggcctgtccagtgtggccgcagctcttcccaggagggaatccctgtcatccaaaagttttctttcccctcctctggccattccaggctaaaggaatgaaagctccctctctctaggctggaaaacaggtaaacgatatgtaatttatgagcaccatcagcccaaagtgcacaagtcatatatgcacaaaggggccgggtaaatatttaaagattagagccagctggggagaaacacaaaaggccagggcaatgggggtctttctgaattcactctccccgagctgggccaggtcagcattgatgcactcgctggagtcccggcctttgtcctctgaagggcccttgtctgctgggctattgggagccccaacacagctaaagagagttaaacaatcgcagcctctccaaccgcatctggagacaattggctgagtcatttcagagcttttgctgtgtgtcccaatagttaattacatggagcaatcacttcatttcactttgaaatgcatctgcagagggggacaacagatttctccctcgtcacctgcatccacagtagcctgtgcggcactcaccagttagcactggttgaaacctctggaagtacagaagggaaggggctgccacacggagccacacggctgtcctctgggatgggccgcaggtagggctcttgtcctggggcccgaaaacctctccctactcttggttccagacctgacataatgttcttttttttttttttttttttttttttttttgtcaaactcaagaaaaccaaatgaggggggaaggggtggcacagacacttgtcactttctgcattaaattccccaacatgagacaggagggggccctgagcagccttggaggctctaagagccctcagaagttagagaaggaagtttttttccttgaatgagcataggggggcctgggtctccccacttctcctcctggacctgtgctcctttccaggccgccttggggaccccagatgctaaagatggaaagggaattggtggcctacatcccagcttgcgtaagccccgcttctaagttggtccatgcccttcctggcagcccgagagcactttgtcctgcttgccctcagaggatagggtgaacccactgccattccccctccagctctgaaaatacctcctggtctctgtgagcccctttggagccaggcctgcctgaggctgtgcgaggatgcccagactcagggcttgtaatcagcgtgacaggctggggtggagggtggaccccgagtcttcagcctgggtttccgggaagggtccctgtagagactagtctgctgtctttcccaatgaccttgtcagatgcaaagcacaatgactttaacttagtaggggaagtggctgcccagagataggagcaagaagtgagggtaaagtggcgatggtggggagaaactcggctcagagctcgggaaaggggagggtggaaatcgcaccaagatctctccccaccttgatcctgcgcgaccctcggccagtgtaaggcgagtagcgggccaaggaggctgtttgtgatggaggagccacgggtgggggcgtcagaaagtagggggatcattccaggtggggagaccactgaccgaaaacgggccacaggacagggggcgcggcgggcagtgtcggggttggggtcggggggcaacggaggcggaagtccattcagtggaccagggcggagcgacgcctgagaattccgcccaggccttgaggcgggcctcgcctcccgcagccaaagcagaacattgcgaattagagcattttgcggtcaattttccactgcttaagaaacactaagctatccacgtgagcgtccccccgcccccggcccgatgcgcctggaatcccaggggacgggcttgggaggggtggtggccctgggaacggcgggtgtcggggttcgggcgggggcagcctcgtggcccctttatggcggcccggactcaggagagggggcgggcccggcacccagcggcgggccgcgagagctgcgcggagggccattggtttgctaatgccctcgagttgaaaggcgcgggcggcggtttatagggaaggattgtaattagaggacaaattgccccgctgccccgcagctcgagaacgcggggagggggaggcccgccggggcgcgacgcgcgccaggcctctgtgcagatgtgcagcagctggaagtccgcgcctggcggggcgcccggagtttggccccgagggggcgggggcgggcgcgggcgccgctttgtggggcccgcacaatgcccttaacactcggctgccccttttgtgcccggccgcgccgcccgcccgccccgcggtgcctttataccgcgccgccaccgccccaagctcggagcgagtcgcatggaggacgccccggcccggccggtcctggcgcttcaaagctgcccggcgcgtgccagcgcccgccgcctggtctcggcccccgccgccctcccaggcccgggtcggcccggatctggcccgcgggccctgcggtccgggctggacagagccccagagctgctgttgccgctgcctcggcctgaaagggggagggcgtggcgcgattctccacgctgcttggcgcctgggaacgccgctatcctgggaagggtaggcgggggcgggctggggggagatgccctggcttgatagagctggggggcgcaccccaccctgagtccctacacagaagccggtttgttcattcctctgccacagggctcagctgcagaatttttgcgacttccctgtcaccctcagaagcaatgggggctgcattgttcagaatataattttacaagccccaaaaactaaagccatgagggcccatgggaggtgtctaggtttgaacccagggacttcctggaggtcagccttcctgtccatcacagcagctacagttcagcctcctggagtccaaccagggggatggccccagagccttgctgtaggcctagcccatcctggggcaagtgctccaggcgcctcctccactgggtccgccgtagtctgaatcatagattggggtgcgggccctggatctctcgaagtgtggcctggagctcttcccagaatgtcagtggtctcctgccaccaccacctgtgcgtggagctgagagcaggctcatgggagtagacttctagtgcttctccatggggacagggtctaccaccaaagccacccagcctggaagcccagggctgtaaggaagggagaggcagccgtgttcaccccacctgcctcctgtgggaagtccgcgttggatcctagcagtgtcagagaacacaggacccaggctgcaccctcaccaggacccctcccaatcccaaggccccagcaaggatgaggctggctgtggccccgcgggtgggctgcatgctttaatgggacacaggctgctgcatggcccccgcgggctcagcttgtgcctggctttgagcagccacaggcagaaaattgctgcattgtcccgacattagggcaactaatgcggcgttgcgggtataaccagagcatgaagtgcataaagaggcgtcgccttggcatcttcatcagtcccgagggagcccagagccctgtcatagtcagtgaggcagcctgtggccagctggcccatgtacctccccagtaggtgacccctggaatgcttgcactccagggtatcaaggacttggcaagtgggactggagaacttacggggattgggacaggatgggcatggagggggtgggcatggcaggggtcctcagactggggaagtggtggaggccagagagataaggaaaagacagataaaggggaggggggggtccctcgggagacagggggggtcctgaaggtgagaggaagcctaggctatgggagggggctgagggaaggaggtggggagcttcccagtgcgtcctccctcggtcccctcctcctcaaggtttctagagtccagagggcctcattgacatgtaaacgagggtccctataaaggcggcgctgcctcgcactggtgcatggactgcaacatgggcacggagcctgctgcccggggcagcctccccggcaacttccgaaaggtctggggtcttgagggactaggggcaggcacccttccccgggaggtgtgggggggtgccgagggcaggagggtggcagtcctgcactctaaaggctgttcatctgcagatttccaagccgctgatggagaaaaagcgccgggcacgcatcaatgtgtcactggagcagctcaagtcgctgctggagaaacactactcgcaccaggtgagactcaggcggggtgggggtgggtgggtgatacgatcccaacctccctctctccacctcgggaggccggtctaatagacctttccatggtcgggtagatccggaagcgcaaattggagaaggccgacatcctggagttgagcgtgaagtacatgagaagccttcagaactccttgcaaggtataggggagggctggagggaggagggggaggcttgtgggatcagagccagggatgcacaaggccaaataaagagggatacctcaaggaccgcttgaccccgggcttttgagaccagcctgggcaacatggcaagacagcaaatataaagaggacaactcggaggcaggtgcagttggtgaggagggggccccagctcgctagggggcgagggaggagcagtaaagcccgggctggctgtgcgattgcaatctgggtggtaggtctggaccccgggggagacgttcgggtcgtctgacctccgccctcctcttcccttcctcaacacgcttcctccctcctttcccctccacctccactcccctctcctccctcccttcctcccctcccctccctcccccttcccctcctc

SEQ ID NO: 96771 - DNA, 21747 bp, Homo sapiens
tggaggagatatttagcacaaaagaacataagatttatttttacaatcaaaaagcagtcccaaatggaataattagtctcaggaggcagattattttctttatttatttattttgagacagggttttgctctgttgcccaggctggagtgcagtagcatgctcacggctcactgcagccttgacctcccaggctcaagtgattctcccgccttggcctcctgaagagctgggactacaggtatgcaccaccatgcctggctaatttgtgtgtgtgtgtgtgtgtgtgtgtgtgtgtgtgcacatgttttttttttttttttttttgagacagtctccctctgtcactcaggctgaagtgcagtagcatgattttcactcactgcaacctcacctcccaggttcatgtgattcttgtgtctcagcttcccgagtagctgggactaccagcacaagccatcatgcctggctaatttttgtactttcagtagagatggggttttatcattttggccaggctggtctccaactcctgacttcaagtgatccacccaccttggcctcccaaagggatgggattataggcgtgagccaccatgcctggccagatttatttttttaaacaaatttatacaaagattctactgcagaccaggtcttgtgatagattccaggaggaggtgggtgggtggaaaaacagaagagaataacattgataccctttgcttgtcttcaagatcaggggttggcgaactctagaccatggcctggtcttgcatggccagtgagctaagaagggtttcacataaaaattgttaaaaataagcaagcaagcaaacaaaaaagaaagaagaatatgcaacaaagacttatgtggccataaagtctattgtatttgttatctggtcctttacagaaaaaaggttgctgatgcttgtccaagatgagcaaatgaggaaattagacatataaggaaataactagctctgaactatatattaaaaagggttattattattattataattttttttttgggacggagtcttgctctgtcactcaggctggagtgcagtggtgtaatcttggctcactgcaacctctgcctcccaggttcaagcaattctcctgcttcagcctctgagtagctgggactacaggcgtgtgccaccactcctggataatttttatattttttgtagagatggggttttgccatattgcccaggctggtcttgaactcctgaactcaagtgaatctactcaccttggcctcccaaagtgctgggattacaggtgtgagccaccacgcctggcctggtctttgatttttaaagttagtctgaaataaatatacaaggaagaataaaaaataaactttttttttttctgtggcccaggctggagtttggtggcacaatcattactcactgccacctaaaccttctgggctcaagtgatcttcctgcctcagtctcttgagtagttgggcctacaggtgcaaatctccacacctggctaattttttttttttttagagacagggtttcactatgctgcccaggctgttctggaactcctgggctcaagtcatcctcctacctcagcttctcaaagtgctgggattacagttgtgagccactgcgcctggcccaaagaaacacttaataaggttttgcatttgataaacaactattttatatgtacgtgtaaatgtaggcattagccttcttggaatcacaatatgttgttaagctgtaataatttaaacgacatagtactcgtacaaaaatagatgaatcgaccctaagtaagaactcatttaatgcctactaaaggcactaattgtgatgaaaggcggggtggagtggctcatccctgtaatcccagcactttgggaggctgaggtgggtgggtcacctgaggtcaggagtttgaggtcagcctgaccaaaatagtgaaaccctgtctctactaaaaatacaaaattagccaggcgtggtggcacatacctgtaatcccagctacttgggaggctgaggcaggagaatcgcttgaacctgggaagcagaggttgcagtgagcggagatcgttacattgcactctagtgcgggcaaccagagcgaaactccatctcaaaaaaaaaaaaaattatgatggaaaacaatccataaacaatgttgggaaaaaaaaatttgcaagatgaagaaagatcaatttagatgttcacctcagatttacatgaaaattaatgccagaggtattaaaaatgaaatttaaaatatccagaattggccgggcttggtggctcatgcctgtaatgccagcactttgggaggctgaggcaggtggatcatgaggtcaggagttcaagaccagcctggccaacatagtgaaaccccgtctctactaaaaatacaaaaattagctgggcatggtggtgcgtgcctgtagtcctagctactcaggaggctgaggcaggagaatcgtttgaactcgggaggtggaggtagcagtaagccaagatcatgccactgcactccagcttgggcaacagagtgagactttgtcttaaaaaaaaaatccagaatttacaaagaaaggtactaagtggataataaacatttatgaatatgtaatggaagcctcaggtcccctttcttccagctacgttttcattgccattcccagtagttctggtactgcgggaaaaatctactgtagaaaattacccaattcaactgaagagtgccaaggagacctatttttctcctgtgtgtttctgcatttcagccagttcctgggctctcatctattccttatcatccatctgtttggggctgccattgtttttgtctggtttcctttgtcctgttgttctttcccaaacaggacaccacatctcttccttttttcctccaaagcattggtaaacaccaagctgttgcatgcattctaacttttattgagtatttgatggtggaaacatggcttagagtaattacaacaaaggggagaaaactgtaaaattttgcattggccattttcattcctaaaatttttttggattggaggaagcgttcatgtgtgttttttagtaccacctggagtcaatttctttcattcaactaatgcatattgaaggcccactgtgtgccaggcattgtgcataggcctggacatctggtggacaaccacagacatagattctgtctctataaagaaggagacaggtattaagcaaatacctatataaatactcaaataaaaaaattcaaaagtttcaggagaaggagcttacaaaatctttccaataatagtatcttagtattcagagacaaaggtccatcagagtagtatgacatcttccaggtttgtcctctatcctcgtctccttagattcctgtctgagtccaagagagagacagactgcaagagacactgaaagaacagtgtcactgaggtcactgagacacctggagacatgtcctggtctggtgcccatcatgggagcagtgaggcgtttcccttctccagcaccctatgaggtggatgacttccatgccttgaatagcaagagatgtgccggaggcctgggagtgagaggaagcagtgccttaaacaccagcagcttgtcccgacaccagatccagcatcagaggcagcagggatgccaaatcatacggttggtgttcagctgtggtgtgtgcctactgtggtttcagtaggcagtgctgaaagaagtcagggtgggctgggagtatgtgtggaatggagaaatgtttgttagcacacacaagatgccccttgggattatggacttaaaaggggaccagaagtctccttacaatgggagggcatgaaagccagagaaattcctgtctcattaatgctaactcaccatgacccctgggctgatgatactctagggaagtatcagttatgttaaaaagagttaacaggctggctcggtggttcacgcccgtaatcctagcacttgggcaagctgaggcaggaggatcaaggtcaggagttctggagtagcctgggtaacatggggagaccccgtttctacagaaaagagttttttttgttttttgttttttttgagatggagtttcactcttgttgcccaggctggagtgcaatggtgtgatctcggctcactgcaacctccgcctcctggattcaggtgattctcctgcctcagcctcctgagtagctgggattacaggcatgcaccaccacgaccggctaattttgtatttttagtagagaccgggtttctccatgttggtcaggctggtctcgatcttttgacctcagatgatccacccacctcggcctcccaaagtgctgggattacaggcgtgagccactgcgcccagcccaaaaaaagagtttttaataatatgatgttgataattgtactgtggttatacatgacatattcctattattagaaaacacacagttggccaggcatggtggcttacacctataatcccagcacttgggaggccgaggcaggtggatcacgaggtcacgagttcaagaccagcctggccaagatggcaaaaccccgtatctactaaaaatacaaaaattagctgggcgtggtggtgggtgcctgtaatcccagttactcgggaggctgagacaggagaatcacttgaacctgggaggcgggggttgcagtaagctgagaccatgccattgcactccaacctgggtgacagagtgaggctctgtgtcaaaaaacaaaacaaaataaaaaaaaacccatacacatttatttaaaggtaaaagcccatgatgtatgtaccttaccttcaaatggttcagaaaaaaattttgtgtgtgtgggtgtattttatatacatatatctatatatatatagagagagagagagaacacgaaagataaagcaaatggggtgaaatattaacaatagttgaatctaggtaaagggcatatatgtggctttatattattgttatttttgcaacatttaataaatttcaaattgtttctaaacagagttaataaaacaataaaattacagcaggatacatgcaataattagtgtttggacagtgtatagtgggacaaaggaaggatccatcagctttgtctggtgatgggggtgtcagggaaggcctcatagagaaattggaggaaagattggaaggatgatgtcttcttttcccatttatttattattattattattattattattttgaggtgaagtcttgctctgttgcccaggctggagtgcagtggagcagtcttggctcactgcaacctccacctcctgggttcaagcagttctcctgtctcagcctccagagtagctgggattacgggtgcacgccactgcacccagctaaatttttgtatttttagtagagacagggttgcaccatgttggctggtcttgaactcctgacctcaggtaatccgcccacctcggcctcccaaagcgctatgattataggtgtgagccactgtgcctggccaattattattcttaattaattaatttatttttcatgaggtgtcacctcagtctaaaaggatgatttcttgacagagttgtgtctagggggccagggcatctgggggaggtgggagagggagaacgcaggggaggattgtgacctatccacgaatctgattagatactgctacattgtatggcctgccttggcaaagcaggatgcccctcctcagatggcgacagtcacctgtgtggccaggaacacagctccctgctcctccagccagtcgcacgtcctttctcatttccacggtcccaggctcaggtaccctcagagggaagggcttcagagggaggggctagcagcctaggctgctcagggttgggctgggcagggctcaggtggtttggctctccacagctctccacataaagggaccagcacttcacccttcatcaggatcctctgcaggggagctccgagtgtccacaggaagggaactatcagctcctggcatctgtaaggatgctgtccatgctggtgagaaaaatgtttttgatccatgtgtgtgggagcaatgatgccagctcaggtctcagttttagagatttagagtttcagggaaatgagyccatggccccttgggtatttgtagtgttggacagccgtggggcatattccaggaggttttagaatgctcatgagcccatcactttccatttgaggattcctgactcagaaaggttaggaagtaagaacgagaggatgacaaaggaagggccagccagtgaccttgtgcatcttgtttttccttagaggacaatgaccagactctgcttcctgttattcttctctgtggccaccagtgggtgcagtgcaggtaaatggcttctgagagtaggagctgcagtttcctgggctcccctctgctgtgcagggcctggagggagtagagctgggcagggctctgaagtcaagggtcaaaggggaagttctggagaggcagggaacccaggctaggcagccaacttgaggtgtggactgggtgctgatttctggcctctcctggggtctggtctgaagcagtcagggtgttagctcaggtatttcctagggcttgattctctgcttctgtggctgtgaggggttcatggggtgagagagtaagaactgtgtccctgctcagctgctcttgtggccttggccttgggatctccagaggcagctgggtgatcagtgctgtgtccagggtacaccctcctctagtcgcagaggaggatattgtgagaatagaatcctcacaattctattcttccagtaggcacaatagtgatattttttcattgatactgggtttattgtttatttcaatccatcagttaaaaaaagcacatttacatatgtcatctcatttgatctccatgcgtataaagaagttattaatgacatcttaaagatgaagaaaaaggatcagagatgttaagtgtctgctcaaggaggcactgtcatcagggtttgtctggattttaccttgagtcctgtaatttttttttttttagacggagtcttgctctgttgcccaggttggagtgcggtggcgtgatgtcggctcactgcaacctccgtctcctgggttaaagagcttctcctgcctcagcctccccagtagctgggattacaggtgtgcaccaccacaccccagctaatttttgtatttttagtagagatggggtttcaccatattgaccaggctgttcttgaactcctgatcttgtgatccaccctcctcggcctccgaaagtgctgggattaccggcatgagccactgtgcctggcctgagtcctgtaattttacactttttcccgctctgccaggcttttggaatgatttctaggcttttagacttatatacatggcccttcatccactggcctctgttaatttttcagctttggtttccagacttctttgtattacaacatatgttccagccacaataagcgactgacctgtagtttttggcaggctgggctgggctgggctctgttattgcttcaggccatctcatgtgctttcttctcttcctggggtgtactctcccctttccttcctgtcctgtagccagctcccattctcccatcaaaatcagcctgctctgagttacagctggtcycttccccagcagttcccaggcctcacccccgttagtgggtttgccctcccatctcagttgggtccctttccatgtgctccttccttgtagaatgtagtctcttgaagaaatgtgtcaaattgtctttgtccrgygtctaggtagttcacacagtaggtatttaattaaaattagtcgagtggaagattccaggtgtttaacctataccagctgttggatcagaccgtcttagcatagggaatccctgacctcctgggacttcagagcagagtgatragttgatacargggcagagattggccaggaaagatggcctcagtggtcagacttctaatgagactcattctcacattttctagcagcagcctcttctcttgagatgctctcgagggaattcgaaacctgtgccttctccttttcttccctgcctagaagctgcaaagaaatcaaggaacgctgccatagtgcaggtggtgagtaatgaaccaactcagcattctctctttgaagccactttttagctcaacagagcccagtcatggaaatcaggagggacatatccatatggagcctgttctgcccccagctcctactcaaggaggtttctagtgggaattttgaggcttttgtgtcccattccagtcacaaagtcttctgaacacagagagaatgcagtgttcctggtgaygcttatggtggtggcaagaactgtgatgcgtctgagatttgcccctacttgccccaggtttatagatgctggcagaaaacctgaaactcccgagccagagacaaagagctttattaatcacagaaatagcagtagccagagcatcagcattttcttgtactgggccaggtgacatctgcccaagtagtgggtttgtcaagctggctgacaaatgtggctggcaaggaaacaacaaaccctttttagagccagagagtttattactcacatagctagcaagttcaagatcggcaaaagtgtcagcttttcccatcccttgccccacaagacagcacagaaaagagggcgagtgacaacacaacatgggcagtggctgaggagccagtccatgctgccatagctgtttcatagcctgtgtaccctacggggtgggggtgagtgaggcaaaaagcctcatacctcttcagaacccaggagatgatgacacagttatgacagctgtctcatgacagcctccacgaaagatgggaaggggggtgagaagtgaccttgttgcagctcctcacaaggttcccatctttccatgtttggggaagaccacaggctttctgccaagacttaggtcagctgtccctatgtggcctatgcgcaaatgtgcaaggtcaccaggatgccaccgtggagccagtctcctgcaagcttgtgaacaggaggggaactctgagcttagggaagctgaatcttatgaagtgggcacaacctttgctctgagctgcacagaggccctatcctgctgtagaatcagatgtggcgtgtgctgatttctggcctctcstggccacagggtggcactgtcgagagggagataccatctctgtctcttctaagactatttgctctacaaactctttgaaaagatagtgtgaagccaagacagtcagtgcctctgctcataggtgagcagmacacaagatgcrtggagcatcrtcttccagcaagtatgtgttgragtcttctgagtgtgcttttgacttcctagggcttttctattcacggagctgagatgaaccctgagctctcagacagggaggctctgggctggttctctctacagatggcctgtattttctccgcaccaagaatggtgttgtctaccagaccttctgtgacatgacttctgggggtggcggctggaccctggtggccagcgtgcacgagaatgacatgcrtgggaagtgcacggtgggtgatcgctggtccagtcagcagggcaacaaagcagactacccagagggggatggcaactgggccaactacaacacctttggatctgcagaggcggccacgagcgatgactacaaggttggtgccacttctctccyactygggtgagggtgaggtgtggagtgtggctggccaccagcctgcaggagggagggctggaaggtggggatatggggaagggctggagaagaagagagaaatacaggacttgaatcacaacttcctctcaacaaggctgttagggccctgggtggtggtgggatcatcagctgggagtggggtgtctgagcgtggctggccatctgcctactgatcccagagctctcagcccagctgaggctgcacatgtggaccttctgcctcctggtacctcctggcccagtcaggctcagtgtctgttgctttccagaaccctggctactacgacatccaggccaaggacctgggcatctggcatgtgcccaacaagtcccccatgcagcattggagaaacagcgccctgctgaggtaccgcaccaacactggcttcctccagagactgggacataatctgtttggcatctaccaggtacacagggctgctggctggggggcactttctttggtgaacagagatcgaagtgtctagggtagggggcagatctgtcctgtggttccacatcactactgagtggttggctgtttctccttcctttgattcactgtgaactcatgtctggyctctcagaaactctaagccrgcaaggaagaggcctgtgggacaggaaagcatggggagaaagagacagggacaaggggtttggggctgttggggagacacagctatggggaaaagcagtcactattatgaggattggttttgggtaatggcagttaatttgaaacccctcctccccccacactgtggcagcatctctactgtcctcacaaaacctttcttctgggtctctgcagaaatacccagtgaaatacagatcagggaaatgttggaatgacaatggcccagccatacctgtggtctatgactttggtgatgctaagaagactgcatcttattactcaccgtatggtcaacgtgagtgtttgctccctaagtccagtcataaatattttcttgtactcttggagaatggtggcaaataacaacaattaataattgctagtatttactgagcacttaaaatgcaccagactcttgtcttggaacttaacatgattttgtgtcatttaattaccatgagaaaactatgaagttagaattgctgttatccccatttcacagcacgtaatcccaggtttcttcatcaccaccttgtatactcttataattgtggggaaaagaaaaagagatcagactgttactgtgtctatgtagaaagaagtagacataagagactccattttggtctgtgctragaaaaattcttctgccttgagatgctgttaatctgtaaccctacccccaaccctgtgctcacagagacatgtgctgtgttgactcacggtttaatggatttagggctgtgcaggatgtgctttgttaaacaagtgcttgaaggcagcatrcttgttaaaggtcatcaccactctctaatctcaagtacccagggacacaatacactgcggaaggccgcagggacctctgtctaggaaagccaggtattgtccaaggtttctccccatgtgatagcctgagatatggcctcgtgggaagggaaagacctgactgtcccccagccygacacccacaaagggtctgtgctgaggaggattagtaaaagaggaaggcctctttgcagttgagataagaggaaggcatctgtcttctgcttatccctgggcaatggaatgttttggtgtaaaacccgattgtatgttctatttactgagataggagaaaaccaccttagggctggaggtgagacatgctggcggcaatactgctttttaatgcaccgagatgtttatgtatgtgcacgtcaaaagcacagcaccttttcttaaccttgtttatgacacagacatttgttcacatgttttcctgctgaccctctccccactattaccctattgtcctgccacgtccccctctctgagatggtagagataatgatcaataaatactgagggaactcagagactggtgctggtgcgggtcctccttatgctgagcgccagtcccctgggcccacttttctttctctatactttgtcgctgtgtctctttcttttctcagtctctcgttccacccaacgaggaacacccacaggtgtggaggggcaggccaccccttcaataatagttaagaaaaggtgcatacaaaacattagctgggcatgatggcgcatgcctgtaatcccagytcctcgggaggctgaggcaggagaatcgcttgaacctgggaggcggaggttgcggtgagctgagttcacaccactgcactccagcctgggcaacaagagcgaaaccctgtcaaaaaaaaaaaaaaaaaagtgcacactgaggttcacaggaaagaaccactagcagagtggtgagagagatttacttttgttatgaaggataactttaattatcttacaaaagacagttttcagtataataagagcacagaagttaagttgtggataaaaaaatcaaagacatcactgtttgcctttgatattttgatgaaagcaggtgatggtcagggaaactaacccatggtaattggatgagaagtgtgtaaacagcaataggcagccacatctgatcattgcttattcctgctgggccttctcagatctttttggtaatctttttgtagagtctagtttctcctgtaagctgtaagcagacctgggtccttttgtgagtcccagcctttgtcctcttgccccctatgaacagaggtttccttggggacaagtttaggactgacgtgcaccagccactggccataaaggtactgggctgcacccctacagcctggggtgtttggctgtagcctcagcttttggcttagggartccctggactggccaatgggatgctgcttctagttcatcctttgactacttggctgtttcttcacctcttctttttcaggggaatttgttgcaggattcgttcagttccgggtgtttaataacgagagagcagccaacgccctttgtgctgggataaaagttactggctgtaacactgagcatgtgagtttttggggagatcaatggcccacgtgtggggaaaagaaagagagatcagattgttactgtgtctatgtagaaaaggaagacataagaaactccattttaatctgtactaagaaaaattgtttctgctttgagatgctgttaacctgtaactttagccccaactctgtgctcacagaaacatgtgctgtaatgaatcaaagtttaatggatttagggctgtgcaggatgtgccttgttaacaatatgtttgcaggcagtatgcttggtaaaagtcatcgccattctccattcttgataaaccagggacacaatgcactgcggaaagccgcagggacctctgcccaagaaagcctgggtattgtccaaggttttcccccactgagacagcctgagatatggcctcatgggaraggaaagaccttaccatcccccagcctgacacccgtaaagggtctgtgctgaggaggagtagtgaaagaggaaggcttctttgcagttgaggtaagaggaaggcttctgtctcctgctcatccctgggaatggaatgtctgggtgtaaagctgaccactcccattcattctattctgagataggagaaaaccgccctgtggctggaggcgagatatgctggcagcaatactgctctgatactctttgctacactgagatgtttgggtaaagagaaacataaatctagcctatgtgcacatccgggcacagtacctttccttgaacttattcatgatacagattcctttgctcacatgtttccctgctgaccttctccttacctgttgccctgctacactcccctcactaagatagtaaaaataatgatcaataaatactgagggaactcagaggctggcaccggagcaggtcctccgtatactgagtgctggtcccctggtcccactgttctttctctatactttgtctctgtgtcttatttcttttctcagtctctcatcccacctgacgagaaatacccacagatgtggaggggctggcccccttcaccatgtgtgtgcatgggtatgcacatgtgtgtacctgtgtggggtgtatcaatgtgtgtctctgtggttactcgcttactctcattctgtttactctcattactctcctgatgatgtcttatgaatataatttattttttatttctttttttttctttgaagagtccttttctttctttttttttttctttgagacagagtctcgctctgtcaccmaggctggagtgcagtggcgcgatctcagcttactgcaagctccacctcccgggttcatgccattctcctgcctcagcctcccgagttgctgggactacaggggcccaccaccacgccccactaattttttttgtatttttagtagagacggggtttcactatgttagccaggatggtcttgatctcctgacctcgtgatccgcccgtctcggcctcccaaagtgctgggattactggcgtgagccaccacgcccagcctgaagagtccatatttttaataaaaattaagtggtacaaagtttggagtagtagatgccagaagttgagtataatttatttgtcttttaaatcttatgtatttatttatttattttttgagagggagtttcactcttgttgcctgggctagagtgcaatggcaggatctctgctcactgcaacctctgcctcccgggttcaagtgtttctcctgcctcagcctcctgagtagctgggattacaggaatgcaytgccacacccggctaatttttttgtatttttagtagagatgggtttagtagagatgggtttctccatgttctcaaactcctgacctcaggcaatctgcccactttggcatcccaaagtgctgggattacaggcatgagtcaccgtgcccggctgagtataatttattttaatggaattcagtttatcaaacttttcatttatggttagtacttttaatgttttctttaagatgtacctccttacaccgaggtcgtgaaaatattctccaatattaatcttaacttttagaagctttatatttttattgtttttccagtcttgtaggagacagcaccacagttgtagtggtgggagattgtatttgagggacatcctgtgcctaggggttggaggaagagagcgtcagagccatcaagaacaagggcattcacttagggcccccttccctccccaactgacagtctgaactcacggttccatcttccctgccccagctttcagctttttcattttccagctaagatgaggcagctattctctcatggagggactcgcagattagaattcggaggatgacgaccacgtgggcagtgggggtggactagagtatatgtctttatgcccttttccttgacaagtttctctactggctctgtgctcctcagactgtccattagtgcgtgtttgtgtatgttcctgcatgcattactactttaaaatacatgcakagggccaggtgtggtagctcacacctgtaatcctagcactttgggaggccgaggcaggcggataacttgaggtctggagttcgagaccagccttgcgctcactggtgtcagcagcaaatcaaattcctcacagtgtttcttctttctgtttcccagcactgcatcggtggaggagggttcttcccacagggcaaaccccgtcagtgtggggacttctccgcctttgactgggatggatatggaactcacgttaagagcagctgcagtcgggagataacggaggcggctgtactcttgttctatagatgagacagagctctgcggtgtcagggcgagaacccatcttccaaccccggctatttggagacggaaaaactggaattctaacaaggaggagaggagactaaatcacatcaatttgcaactctatgtttctttgaattctttttataaattggctgatgtgttgagggatattttaaaagaatacctatggttctggtgaattccacctcacatattctgggcttgcacagtggctaggaagaacccattgaataaaaataaatgttcacttcagcaacacatatactaaaattggaacaatacagagaagattagcaaaaagatataaaaaaattgaaaaataaaaagacattctgggccagggatggtggctcatgcctgtaatcccagcactttgggaggccgaggcaggtggattgcctgaggtcaggagtttgagaccagcttgggcaacatggcaaaacttcatctttacaagaagtacaaaaattagctaggaagtaatgcgtgcctgtagtcccagctcctcaggaggctgaggtggaaggttggcttgagccagggaggcagaggttgcagtgagccaagatctcgccattgcactccaccctgggtgacagagcaaaactttacccaaaaaaaaaaaaaaaaaaagaaaagaaaagaaaaataaagacaaagacattctgggtttggaatttcaagtctcatctgtcccagaacacaagtatgttcctgtttttaggagatccctgaactggatttaaggacaagagaaaatatttcatgttagttcttcctaatgcacctttattagctaattaaattaagccttcaatataaacatattaaagaagagaaacaggagatagcacaatcacccatttcttttattcttccagctttagcagacagggtagtctctccagaggtgcatgtgcctggccacatctggaatcccaactctagttgcttactaaaaaggagagatggccaggtgtggtggctcacacctgtaatcccagcactttgggaggccgaggcaggcgaatcacaaggtcaggagtttgagaccagactagccaatatggtgaaactccatctctactacaaatacaaaaattagccaggtgtggtggtgtgcacctgtagtcccaggtactcaggaggctgaggcaggagaatcgcttgaacccagtaggtgggggttgcagtgagccaagattgcaccactgcactccagcctgggtgacagagcgagactacatctcaaaaaaaaaaaaaaaaaaaaagagagccaggcattccaatcaggtctcaaacaggatgttgactacagcagtcctggctggtgaagagggcttggacgtcttatagtttttttgctccaggctgggtgcggtggctcatgcctgtaatcccagcactttgggaggtcgaggcgggtggatcacgaggtcaagagatcgagaacatcctggccaacatggtgaaaccccgtctgtactaaaaatacaaaaattagctgggtgtggtggtgggtgcctgtcatcccagctactcgggaggctgaggtaggagaatcacttgaaccccagaggcggaggttgcagtgagctgagatcatgccactgcactccagcctgggcaacagagtgagactgcgtctcaaacaaaacaacacaacacaaaacaaacaaacaaaaagtgctttgctccaaatgcaaatctaatcataacatttcccaaacccattaccacactttttctccattgctccctgtggactagagcattggttttcaaatgggatgggaggtaggagatgtagtggtgattttacctctcagatagggtttttcacctctcagatagggttgccagatttagcaaataaagatatggaaggccaacttaaatttgcatttcagataaacaatcgataatatttttagtatgtttgtcccatgcaatattttacctggcaaccctacatctagggaacatttggcaatgtctggagacaccgcaatgagtggtggtggaaggcctggcaggagcgctactgacatctagtgaatagaggctggagatgctgtgaaacaccttacactgcacaggacatccctgctccatgacaaagaatggtctgatctcaaatgccagctgtgctgccattgagaaacagaggattttgtttaaattctatagaatggaagtcatgaagccctgacagctgaaggcaataaagaactttttttttttttttttgagatggagtcttgctctgtcgctcaggctggagtacagtggcaagatcttggctcactgcaacctctgcctcccaggttcatgccattcccctgcctcagcctcccaagtagctgggactacaggcacccacgaccatgcccggctaattttttgtatttttggtagagacagggtttcactgtgttagccaggatggtcttgatctcctgacctcgtgatttgcctgcctcagcctcccaaagtgctgggattacagggctgagccaccgtgccaagcccaagagcatttaaaaaaagagatttaaggccaggcatggtggctcacgcctgtaatcccagtactttgggaggccaaggggagcggatcacctgaggtcaggagttcgagaccagcctggccaactggtgaaaccccatctctactaaaaatattaaaaattagctgggtgtgatggcaggtgcctgtaattccagctactggggaggctgagacaggagaattgcttgaacctgagaggcggaggttgcagtgagctgagattgtgccactgcactccagccagggcaacaaatagtgaaattccatctcgaaaaaaaaaaagatttgaacaaatgtacccaatggctttttttgtgtgttttgtttttatagttttcataagggtctattttattattggtgggtaacacatttaatatttaagcccgtttaaataatgtatagacgactgcatgcaacatgcaccatggctgtaactggatagagaaccaagtcaactgaagaccagctaacaagaaactaaatatttaaaatactaaatattgggaagggttccaagatggccaaataggaacagctctggtctgcagttcccaacgtgatcaatgcagaagacggatgatttctgcatttccaactgaggtacctggttcatcacattgggactggttggacagtgggtgcagcccacggagggtgagctgaagcagggtggggcatcacctcacctggaaagcacaaggggttgggggatttccctttcctagccaagggaagctgtgacagactgtagctggaaaatcaggacactgtcacccaaatactgtgcttttccaatggtcttagcaaatggcacaccaggagattatatcctgcacctggctcagtgggtctcacgcccacagagccttgctcactgctagcacagcagtacaagattgagctgcgaggtggcagcctggctgggggaggggacgtctgccattgctgaggcttgagtaggtaaacaaagtggcctggaagcttgaactgggtggagcccaccgcagctcaaggaggcctgcctgcctctgtagactccacctctaggggcagggcataactgaacaaaaggcagcagaaacttctgcagacttaaacatccctgtctgacagctctgaagagagcagtggttctcccagcacagtgtttgagctctgagaatggacagactgccccctcaagtgggtccctgacccctatgtagtctaactgggagacatctcccagtaggggccaactgacacctcatacagctgggtgcccctctgagacgaagcttccagaggaaggatcaggcagcaatgtttgctgttctgcgatatttgctattctgcagcctctgctggcgatacccaggcaaacaggtctagagtggacctccagcaaactccaacagacctgcagctgagggacttgactgttaggaggaaaactaacaaacagaaaggaatagcatcaacatcaacaaaaaggacatccatgccaaaaccctatctgtacttcaccatcatcaaagaccaaaggtagataaaaccacaaagatggggagaaatcagagcagaaaagctgaaaattctaaaaaccagacagcctgttctcctccaaaggattgcagttcctcgccagcaatggaacaaagctggatgtagaatgattttgacaagttgacagaagtaggcttcagaaggtcataataacaaacttctctgagctaaaggaggatgttcaaacatatcgcaaggaagctaaaaaccttgaaaaaggattaggcgaatggcaaactagaatcaacagtgtagagaagaccttaaatcacccgatggagctgaaaaccatggcacgagaactatgtgacgcatgtacaagtttcagtacaagcttcagtagccaattcaatcaagcagaagaaagggtatcagtgattgaagatcaaattaatgaaatgaactgagaagagaagtttagagaaaaaagagtaaaaagaaatgaacaacacctccgagaaatatgggactatgtgaaaagaccaaatctacgtttgattggtgtatctgaaagtgatggggagaatggaaccaagttggaaaacatgcttcaggatattatccaggagaacttccccaacctagcaaggcaggccaacattcaaattcaggaaacatagagaacaccacaaagatactcctcgagaagagtagtatcttggtgaatctgacacataattgtcaaattcaccaaagttgaaatgaaggaaaaaatattaagggcagccagagagagaggtcaggttacccacaaagggaagctcatcagactaacagcatatctctcagaagaaactctataagccagaagagagtgggggccaatattcaacattcttaaagaaaagaattttcaacccagaatttcatatccagccaaactaagcttcataagtgaaggagaaataaaatcctttacagacaagcaaatgctgagagattttgtcaccaccaggcctgccttacaagagttcctgaaggaagcactaaacatggacaggaacaaccggtaccaggcactgcaaaaacatgccaaattgtaaagaccagcgatgctaggaagaaactgcatcaactaacaagcaaaataaccaactaacatcataatgacaggatcaaattcacacataattaaacttaaatgtaaatattaacaatattaaccttaaatttaaatgggctaaatgctccaattaaaagacacagactggcaaattggataaagagtcaagacccatcagtgtgctgtattcaggagacccatctcacatgcagagatgcacataggctcaaaataaagggatggaggaagatctaccaagcaaaaaaaagcaggggttgctatcctagtctctgataaaacagactttaaaccaacaaagatcaaaagagacaaagaaggccattacataaaggtaaagggatcaattcaacaagaagagctaactatcctaaatatacatgcacccaatacaggagcacccaaattcacagagcaagtcctcagagacctacaaagagacttagactcccacacaataataatgggagactttaacaccccactgtcaatattagacagatcaacgagacagaaggttaacaaggatatctgggacttgaagtcagctctgcaccaagctgacttaatagacatctacagaactctccacctcaaatcaacagaatatacattcttctcagttccacattgcacttattccaaaattgaccacatagttggaagtaaagcactcctcagcaaatgtaaaagaacagaaatcataacaaactgtctctcagaccacagtgcaatcaaattagaactcaggactaagaaactcactgaaaactgcacaactacatggaaactgaataacctgctcctgaaagactactgggtacacaacgaaggcagaaataaagatgttctttgaaaccaatgagaacaaagacacaacataccagaatctctggg

SEQ ID NO: 96772 - DNA, 12941 bp, Homo sapiens
tcttggcatgacccccagcgacccacgtagccgaggtgcaggcagtgggcacggccctcttggcatgatacccagtggcccccgtagccgaggtgcagacagtgggcgcggccctttcggcatggcccccggcggcctccgtagccggggtgtaggcggtggctgtggccctctcggcgtgatccccggcggcccccgtagctctcacccggtagaggccgtacgtgctctcggcgtgatcgaagggcacgaggcgctcgtcgcagaagcccagcgtccagcgcgctaagctagctggcccggcaggggcgacggcggcgggtagctcgcgggctagcatcgagacgaggctcccgcccgacaggccgagcgcgaaacgggcgcgggcccctgccaggcagcatgctgcgcgctgggccaccagctgcgctagcgccgcacccagctcctgggaactcgagaacaccgagatgaggcccggggccggcgcggccatggcgagggcggcggcggggaggaggaagcgctccctacggccgtcgctagtacgcctgcgcaagggccggccctgccgcttggtttcgagtactttgggtgattgtctttggcacatgcgcagtgaggcaagtgaagcaccgcgaaggtcgggcagtcggtccggccctacccattgaatctttgcctgctgtgcctgagtcgaagtgagttcgggaagccagtgcccgaatgctcaaccttgctgtatcagggagggccggagaggggagctcaagaagaggacgtcctatcgaggtggcagggattttctgaaggagggcgtattttggtgagttttaaaattcctgcaccgccgggcgcggtggctgacgcctgtaatcccaacactttgggaggccgaggcgggcggatcacgaggtcaggagatcgagaccatcctggctaacacggtgaaaccccgtctctactgaaaacacaaaaaattaaccgggcgtagtggcgggcgcctgtagtcccagctactcgggaggctgaggcaggagaatcgcttgaaccggggtggcggaggttgcagtgagccgagatcgtgccactgcaccccagcttgggcgacagagcgaggctccatctcaaaaaaaagtaggggatgaaaatatgcttgttgaattttttttttttttttttttacattttccggacggacgggctcttgctatatggtctaggctgatcttgaacccctgggctcaagcgatcttcctgcctcggcctcccaaagtggtagcattcaggcgaaagccactgcgcctggccatgcttgttgaattttttaagctaaccctcctagtgtggtggtgtgtccctctgagtgcccagaaaggcctccaatcgagttcttgcctggacagagggctggaaggggaagaaggcctggtgggcctggggaggctgggccacttctgagagtgggatatttcagtgatgtgtgtaagcgcagttcaactcacacaggtagtggattttaaaatcagtagcaaattaagaaaacaattccatttaccatagcatcataaagtataaagtaggcataaatttaataaaagaagtacaagactgtacttcttgagagctgtagctgggcttggtggctcacagctgtaatcccagcacgttgggaagccaaggctggacccggtggcagctgcctgtggtcccagctacttgggaggctgtggtgggaggatcacttgagcccaggagactaaggctgcagtgagctgtgttcctgccattccactccagcctgggcaatagagtgagaccctgtctcgaaacaagcaaaagaactaaaactttggtgaaaaaaaaaattaaagatgatctaaataaatggtaagacattccacgttcatggattggaaagtataatattgttaagatggcagtactccacaaattggtctacggatgcaatgtaatccctttcaaatttacaatgtttttgttgaaattgacaaattgatcctaaaattaataataaattgcaaatggccccaaaatagccaaaacaatattgaataaaatacgaggactcatactttctcatttcaaacaataaaaaggtacaataaccaaaactgtggtattggcataaggatagacatataaataaatgattggaactgatgcagaaataaacctatgcatatatggtcaactcatctttggcaacggtgccaggactattcaaaaagaaaggagggctgggcgtggtggctcacgcctgtaattccagcactttgagaggccaaggcaggtggatcacctgaggtcgggagtttaagatcagcctgaccaacatggagaaaccctgtctctactaaaaatacaaagccttagctgggcgtggtggcacatgcctgtaatctcagctactcgggagtcggaggcaggagaatggcttgaaccccggaggtggaggttgtggtgagctgagatcacgccattgcactccagcctgggcaacgagcaaaactctgtctcaaaaaaaaaaaaaaaaaaaaaggaataggccaggcgtggtgcttcacgcctgtaatcccaacactttggcaggccaaggtaggcagatcacctgaggtgaggagttcgagaccggcctctcaaatgaagtagaaaccccatctctactaaaaatacaaaaattagccaggcgtagtagctcatgcctgtaatcccagctattcgggagtctgaggcaggagaatggcttgaacccgggaggcagaggttgcagtgagccaagatcgcgccaccgcactccagcctgggcgacagagcaagactccctcttaaataaataaataggccgggcgcggtgcctcacgcctgtaatcccagcactttgagaggccgaggcgggtggatcacgaggtcaggagatcacgaccatcctggctaacacgatgaaaccctgtctctagtaaaaatacaaattagccaggtgtggttgcaggcgcctgtggtcccagctacttgggacgctgaggcaggagaatggtgtgaacctgggagaaggagcttgcagtgagccgtgatctcgccactgcactccagcctgggcaacagagctagactctgtctcaaaacaataaataaataaataaataaataaataaataaataaaacccaaaaagtctgttaattaataaaaaaaactaacagagttcaagcctaagagtcattgggattattttctggccaacttggagggaacttcctagacactattgcagctagaggctttggaacaagaaagttcactgggccactgtctcacctggagcccctggcaatgagtccattccccttcttgtgcctcagtttctgcatctgtacaatggggaccatggtgacacttcctgaagtggttgcgaggttggagagagattagtcagaattcacttgcccagctgggtgccatggctcacgcctgtaattccagcactttgagaggccaaggtgggtggatcacctgaggtcgggagtttgagaccagcctggccaacatggtgaaaccctgtctctactaaaaatacaaaaatgagctgtgtgtggtggcacgtgcctgcaatcccagctactgaggaggctgaggcaggagaattgcttgaacccaggaggcggaggctgcagtgagtcagattgtgccactgcactccagcctgggcgacagagcaagactccgtctcaaaaaaaccaaaaagcaaaaaacaaaacaaaaaaattcacttgctcatctgcacacgagggtcaccccctcagtgtcctctcccagcaaatgctctgtcacctcctgtcccctgaggtagagacaacaaacaagatgccaacattatgacacgcgagggggacagcagaggtgagagtcagttgagagtacagtagtccctgcttattcaaagtttctctttctgaggtttccacagttcaaacatattaaatggagaattccagaaataagcaattcataagtttcaaattgcgtgctgttctgaggagcatgatgaaatctcggactgccttgctccatccctctctgtcccgcccagggtcatgaatcacccctttgtccagcagatccatgctggagacaccactccccccatgcccactcatttgtcacttagtagcctcctggttatgagattgaaaaaccagtataaactgggcacggtgactcacacctgtaatcccagcactttgggaggccaaggcaggaggatggcttcagcccaggagttcaagaccagcctgggcaatacagtgggacctcatctctgcaaacaaatcaaaaaattagctgggcgtgatggtgcatatctgtagtctcagccacgcaggaggctgatggaggattgcttgtgtgtgggaggtcaaggctgcagtgagctatgatcatgccactgtactctggcctgggcaacagaataagactttgtcttaaaaataaataaattaggccacgtgcggtggctcacgcctgtaatcccagcactttgggaggccgaggagggcggatcatgaggtcaggagattgagaccatcctggctaacacggtgaaaccccatctctactaaaaatacaaaaaaattagccgggcgtggtggcaggcacctgtagtcccagctactcgggaggctgaggcaggaaaatggcgtgaacctgggaggcagagcttgcagtgagccgagatcgtgccactgcactccagcctgggagacagcaggactccatctcaaaaataaataaataattaaattaaattaaaattagaaagggaggaaaggatgaaggaaaggaagggagggagggagggaggaagggaaagaaaaagaaggaaaggaaagaaaggaagaaagaaaagaaacaaaacatatttagggctcagtattatggtcagtttcaggcatccatttggggtcttggaacatatcccccagcgattgggaggaatactgtatagactcctgagcttggagtcctgggttcgaatcccagctcagacggccaccccagcaggcctagcgactttcacccagagctctcacaccagccggcctgtacatggaagaggacactgccagggcagccacaggtgccaggacataccgtgatctgagccatcctgcaacacctgcaggaacccacaggcaggctggccatccctcccctgcaaccacaaggtcaacgagggcctgtgaggcccagacactgcagggaggtgcctccccctcggcaggccagcgagagggccaacccgagtgcccctgccccaaggtccctttggtcttgcagatggggccacatggtacagggtcccttctttttcttttcttttttttttttttttgagacaaagtctcgctctgtcacccaggatggagtgcagtggcaccatctcggctcactgcaacctccacctcccggcgcaagcaattctcctgccccagcctctggggtagctgggattacaggtgcgcgcaccaccatgcctggctacttttttgtattccctccctccctccctctcctctcctctctcgctctttccctccctccctccccctttctctctttctttctattttgaaccagagtctcgctctgccacccaggctggagtgcactgcaacctctgcctcctaggttccagcaattctcctgcctgagcctcccgagtagctggaattaaaggtgtgagccaccatgcccagctaattattttgtttgtatttttagtagagacagggtttcaccatgttggccaggctggtctcgaactcctgggctcaagtgattcacccacctcagcctcccaaagtgctgggattacaggcatgagccactatgcccggctggccgagtcctgccttctgaaactcagcaagggttctgtgccacatagggacactcaatgaatgggctcccagcaggcaccagacggtcttcaggtttatttcttaaatcaattaggaaataaaaccacagtgcccaggaaagttcacatgagacgccacggtgtctyttgccatggccccaccactccaggggccagggggtgctgctggagggaggacagacggrcaggcggcctgggtggccggccccagaaaggctggcgtggatgttcgagatgagccaccagcgaagccagtagggatgtctgggcygtcctggtgggattgtctgggacatcgccaccaacacggtgtcagagccatcagtggggacatcggaggggccaccaccaggtggggtatattcaacaggctagaacccctgaggcttgagaggccaacccccggcaggagacctcccctgacccctctgctgcctctcctgtgggaccctccagtagacacaccagatgaggacacccaggaggcctcctcccaggacaggaggcagctggctgggcagccacgcagtgcagggttcagggccctccagcaggagctccatggagatggctaaatggggacatcaaggcaggggctgacagtggtgacatccaagtggtcacagtcaattccggaagctttcagggcatcaggaggggaaggtggggctggggaaatgtgacaggaacggggaagtgcaaaaggcaattggcctagcctgggagattttccagttggcctgggggacccccggctcctccattcagcagggagggcggagggcctgcttggaagtcacatggagctgcagcatctggaacccaacagccacaggaggcctggatyggggctccgtaaggcacagccgagagggaggtggggaggccccagtccgagtccagggcccaggggagatgattcctgcagtccccaaaagcagctggaccctacacaagatgcagctcccaggacacgygtgttccactctcggcaggagaggagaggaaaaaggaaaggccgggccagaggctcacgcctataatcccagcactctgggaggccgaggccagcggatcacctgaggtcaggagttcaagaccaacctgaccaacatggtgaaaccccgtctctactaaaaatataaaaattagctggacgtggtggcgggtgcctgtaatcccagctactcaggaggctgaggtgggaggatcacttgaaccccaggaggcagaggttgcagtgagccgagatcccaccactgcactctagcccgggcagcagagtgagactctatcttaaaaaaaaaagaaagaaagaaagaaaagaaaaagagggaagagttaaggccagacagggacagggatggaaggagacagaggctgaaaagcagggagaggaggcagacacaggggcaccaaggcagcagagaggcacgggttcctctgaggttccagtttctcagtccaggatgggccgtgccaggtacagctcggccaggtgggtgtgtactaggcggccacccctgggcagcgctgtctggctcaagctggcctctcccaccaggcccagagtttgtggccagtagaggaacagcttcagagggcgaaggcgcccgagcagatgcgagtgtagactgcctcatttaagggcaggtagtggccctgcttcaggtccaggaagaagagccggtctgaggtctggcgtgggtcaaagccctctcgctgcagcctcgtcttctggatcttgaaggtgcctatagtggggatggggggcagataagggctgagcaggtggcttctgggaggcctcaactcaatatcctctcctgcacctctggaccttcccacaggctgtcccctgggcaggaatgttcttccccattttgcctgcctgattcccccttgtctgtcagatcctggcttcatgccccctcctccagtgaggcctccctaaccactcctcaccagggcaagaaaatgtacaccctgcctggtcatgtgtccattccccacatgacaggcagggctgtgtctgttacacagtgaataagagtttagcaacttacatcctgtgggccaaatttggccctccacctgtttttgtaaataaagttttactggggccgggcacaataatggctcatgcctataatctcagtactttgggacgccaaggcaggagggtcgcttgagcccaggagtttaagaccagcctgggcaacatagtgagactctgtctctgcaaaaacccttttttttttttttttttttttttttgagacatagtcttgctttgtcacccaggctggagtgcagtggtgtgatctcggctcactgcaacctccacctcctggattcaagtgattctcctgcctcagcctcccaagtagctgggattataggcgtgcaccaccacacgtggctaatttttaaaattttggtagagacagggtttcactatgttggccaggctggtctcgaactcctgacctcaagtgatctgcccgcctcggcctctcaaaatgctgggattacaggcgtgagccaccgcacccggccaacaatttttttttttttttaaattagctgggtgtcatggcacgtgcgtgtagttccggctacttgggaggctgaggtgggagaatcacttgagcccaggaggagaagactgcagtaaactatgattgcattattgcattccagcctggacaacagcaagatcttgtctcaaaaaataaataaaaatttagaaataaagttttattggcacacagccatgctcattcatttgcacattgtctatggctgcttttgcacaagaatagcagtgttgaatagcaatcgaggctgtatggcctgcaaagccgaaaatattaactatctggtcctttaagaaaaagtttgcctgagcccaggactgcgagaccagcctgggcaacacagtgagaccctgatatattttggctgtgtccccacccaaatctcatcttgaattgtagctcccatacttcccacgtgttgtgggagggacccggtgggaggtagttgaatcatgggggtgggtctttcccgtgctgttctcatgatagtgaaggggtctcacgagatttgatggctttatttggtggtttttaaaggggagttcccttgcacacactctcttgccctccaccattaaaaagtccctttgcttttccttcgtcttctgccatgatggtgaggccatcccagccatgtggaactgtgagttccattaaacctctttcctttataaattacccagtctcggatatgtctttattagcagcatgagaatggactaatacagaccccatctctacaaaaaatcaaaaaaattagtcaggcatggtggtgcctgcctgtagtcctagctactccagaggctgaggtgggaggatcatttgaacccaggaggctgaggctgcagtgagctatgatagtgccactgcatgccagcctgggcaacagagtaagaccctgtctcaaacaaacaaacaaacaaaaaaaacaaaagaaaaagaaaagatacaccgaggccgggtgcagtggctcatgtgtgtaatcccaacactttgggaggccaaggcaggtggatcacttgaggtcaggagttcaagaccagcctggccaatatggtaaaactcgatctctactaaaaatacaaaaaaattagctgggcatggtggtgcacacctgtaatcccagctattcaggaggctgaggcaggagaatcgcttgaacccaggaggtagaggttgcagtgagccaagatcacgccactgcactccagcctgggtgacagagcaagactccatctcaaaaaaaaaaaaaaaaaaaaaaaaacaaaaaaaacactatttcagaatgcttagtggcagtggaagtgaggaatggaaataaataactactaaaataaaacagcagaagggacccgtgagagcccacagtgctagctggctgtgagcccttgtgtcagtcccaggacactgtcctgaactaggatgagtaaatggtttggatatggtttgtttgtccgcaccaaaaatcatgttgaaattattattattattttgagacattgtctcactctgtcacccaggctggagtgcagtggcctgatctcggctcactgcaacctctgcctcccaggttcaagcaattcttctgcctcagcctcctgagtagctgggactacaagtgcatgccaccatgcctggctaatttttttttgtatttttagtagagacacagtttcaccatgttggccaggctggtctcgaactcctgacctcaggtgatccacctgcctcagcctcccaaagtgctgagattacaggcgggagccaccacacccggccaggtattcttttttttttttttttttttgagacagagtatcactctatcgcccaggctggagtgcagtggcgtgatctgggctcactgcaaactccgcctcccaggttcatgccattctcctgcctcagcctcccaagtagctgggactacaggcacccgcaaccgtgcccggctaattttttgtatttttagtagagacagggtttcactgtgttagccgggatgctctcgatctcctcacctcgtgatccgcccgcctcggcctcccaaagtgctgggattacaggcgtgagccaccgtgcctggccccggccaggtattcttttagagcaacacaaaatggaccaagacatgaatcaacagacacactgatggatgaagagagaggttggagtgggggagactcgcacctgtggtgtccacctggggcaggaggcgcaggaagatgggccgggcatagggtgccagcaccttctgcagctcctggtatatcgcgttggggtccagcaggctgtgggggtctgcgacggccgccatccctgccttaccctccactcctggaggcagaggctcagctgaggacaccccgcctctcatcctccccaccagcaggaccagatacactgtcaagcagtagcccctggtctgtaatctccagtctctcccaacctgggatgacatttatggaagcagccacacattttgtggagctcctgcttggctcattgaagccctaagacaggtgggctttcatgatcccattttctggatgacaaaactgaggctcaacatcacccaggtgaactggctccagatccagtgcttcctcctgggctgccatgagcagttgtccaggttgtgcactgcccaaaggcatgtgtacttctaagccccttttggctgagctccctcaggaccatgcctcaggaccaccccctgcaaccccagcttgcctggaacagccaccccatagacggccacgtctgtctggcccagcaggcggctcagcacgccctccacctcggtggtggagacgttctcccctcgccagcggaaggtgtccccgctacggtcccggaagtacatgtagcccagctcatccatcactagcacgtcacctggcagaggggagaggggcagatgggtggcggatccccatccgcacagccagtcaccggggcctagcaggctgcgcacctgagaggtaggcgctgtcgcccttgctgaagacgctgtgggcgatcttcttgctggtggcgctctcgctgacatagccatcgaagcggcgcagcgggtcctgttggttgatctgacccacaaggaggccaggctcccctagggagaaggccatgttcaggctgcgctaggcaggcagggcgtggggacccctgctccgggtggggaccatgcgggggccctgctcaccggcctggcaggggatgcagaggccctgggcatcccgcagcagctccattgtgtcctcattgaccttcaccagccggatggggtacacgtggggcaggatgcggctgttgaaaccacaggagccgacctggaatggggtgaactgagttggaaggagccggggatatgcggggtccttctcagtaacactttgcctgccttgccctggggcttggacctagcacctccagtgtcattctaagctctgtgaccttggctgatctgcaaaagcagggtagtaagcgtcgcctccaactcagggcccctcctcccaccttcccagcctgcattcagtcaagagaagacctctggctggcacccacttcctgatccacaaaaccctccatgctggcaggaagtagatgcctctgtgtggacactacagctacgtcagacactgcagagcttcacctgctgcccgccgccctgcttggcatggttctatgaacagaaatgcttctccaacatgtttgagccactacaccctgtctggtgtgtttctttctgcttttcccccttcctccgttcctcccttccttccttccttcctttttttatagagtcttactctgtcgcctaggctggaatgcagtggcgcaatcttcgctcactgtaacctctgcctcccacgttcaagtggttcttatgcctcagcctcctgagtctgggattacaggcgcatgccactgagcccaaacaatttttttttttttttgtatttttagtagagatggggttttgccatgttggccagactggtctcgaactcgtgacctcaagtgatccacccacctcagcctcccaaagtgctgggattacaggcgtgtgtgggtggcaagctacccaggtgccgaggcaagagaccgagggcacgagccattccagtataataaaatatataaaacaacaagagttatactagatctagatcatagacatgattatatatgaatatcattagtcattagtttgtagcaattactctttattccagtattataataatcctcgctctgtaatcataacctagaaaaaaccgggccatagagagataggagctgaggggacacagtgagtagtgaccagaagacaagagtgcgagccttctgttatgcccagacagggccaccagaggg

SEQ ID NO: 96773 - DNA, 13445 bp, Homo sapiens
tctgcactccagcctgggtgacagagcgagactccgtctcaagaataaataaataaataaataaataaataaataaataaataaataaaataaactgtcccgtttgttctatttccccagcaagaggaaaacttgggcaacttgatccatgagaccgaatccttcttcaagacgagagacaaggagtaccaggaaacgataggtcagatcgaggtgagggctcgggacgtggagcccactcgtgaggctctcctgaggtccacatggttgagatcctggcgatcaaacacccatgtgtcatgggcaggggctggtagagtggggcaggcgcaggatcgggagtcaggaggcctcggggcgagtaatgtctttcttagggcctcagtttcctaatctgtcaaatgggggtggtgatccttgcctgcctcagagaattagaaagaatatatgtagctgagatgatcccataataaccacagagctgacattcgagtgatagtgagtgacacaaggtgctgagtatgcccggtatccttacctgtgccctatgcagtaggcaccgtgcaccccttttacagaggaggagatgaggctggaaaggaccaagtgacttgcccaaggccttgcggccaggaagcagcattgaagtataattctctctggctccagaggctgtgcatgtgatcacttctataaacgatagtcattgctattatgcaggagaaagggaagcccagctccttccctagaggaagtatcacttgatagaggacaagagtcagaaacatgaaaaagccttcaggatttttgtaatcaggtctggataaaggaacccaaagatgttgagttctcagaaccgggtggggtgcatcagagccaggctgctgctggggttgctaagcaaccattcccctttggccagaaggagttctaggggaagtggacccatgtgcagagagcagagggtgagggaggttgatgtccggaggcagggtcctgatggcatggtgtccaatggtggccttgatggcaccatccctgaggaatccaggaggagaggttgccgaggcttctgtcacgaggatgacttgccctcacccttattcctcattggttcctcccagctcgagctggccacagccaaaagtgacatgaaccgacacctgcacgagtacatggagatgtgcagcatgaagcgaggcctggacgtgcagatggagacctgccgccggctcatcaaaggctccgcagacaggtacccgcccatcctcccaggggattcagctatggcatccttggaggggaattcccaaggctgcaactcggccatgtgtcatgctcccaacctgtctctctgtccgtccatctgtccgtccgtccgtccatccatccatccatccatccatccagtgactattagcacacctatgtgccagatgccttacatatctaacctcatgcaagtcccaccaccaccctgccctttgttgattcaatagatacttgccaaaggcctgctctgtgcaagacggtggggccagtaagtatagcccctgccctcaaggagcttaagccccattttctgctgaaatggggagcagaggtggacagggcatgctcccatttgctcacaggaagtgatttcccttcctttcccatctgttagtctgttctcatggtgctataaagaattgcctgaggctgggcgtggtggctcacacctgtaatcccagcactttgggaggctgaggtgggaggattgcttgagcccaggagttcacagctagcttgggcaacatagcaagaccccgtctcaaaaaaaaagaaatgcctgagactgggtaatttataaaggaaagaggtttcgttgactcaccgttccacatggctgaggaggcctcaggaaacttatagtcatggcagaaggcacctcttcacagggcggcaggggagagaatgagtgcctagcaaaggggaaacccccccttataaaaccatcagatctcgtgagaactaactccctatcacaagaacaggatgggggaaaccgcccccacgattcaattatctctaactggtccctctcatgacacgtggggattatgggagctacaattccagatgcaatttgggtgggaacacagccaaaccatagcatcctcttccaacccagggcctgtccccaggagactgacaagtgtcaggcatggcacataaagcagagcccctgccttcaaagacacacagccttatcgggggacagccacgctgagaatgagctaatatgaggagaatgcctgccacacagcacaaatacgttgtcactgttttcctcgttttgctgcattactgtacgagagggagggacagctctgtgggggccagatctgtgtgcagggccgtagccttgcctttcagacctttaactcctcaaacccccagaacccagtgtggttatctccattatccagacagaagagcagacgctcaggcaggttaaacggtttgcccaagttcccccacccccagctcatccgagatagaatcagaactgcaccccagtgatgttaaccatatcccgcatggcctccttttgagctctgagtcattcaggttttacttagcacctactatatgcccagacatgggttaggtgcttggagagtaacagccaaacttgatccacggtccagctcccaaggggctttcttcctagagaagccaacacagccagaccaagtaggggctggtgcagggggttacctcgtgagcttaaaggatcttaaggatagctgagtgaggcaggagctcaggaccaggcccctctgagagtagatcttatagaagtggcagctcagccttcccactccttgacccttcagaggcccagggctgctctctgaatttccccactctcttgtgcttctcaggaattcaccgtcccccagctccgtggccagcagcgactcaggaagtacagatgagatccaggatgagttcgagcgcgaggcggatgtggagcccatggtcagctgatgactgaggccctgcgagcctggtggtcttggtgatggggccctgccacctctcctcatggggccaggaaggcccctcggagtggggttcgaagccacaccacacagactttctctgccctcccttctctggaggccctgagggactgctgcttccttccttccttccacaccaccaacgggtgccccgtctccatcccccacccacccaaggaatggtgctgtcaatttctattgttctccacattacaaatgcagacttctgtgcggactttgcagtgttaactgtgccttctcccttaagctgagccactttgagctccaaagaattattcctagcaggtgtttttatacagaactctaagctgagggccgggccaaccggccgtggtgtaatgtggtttctgccgtccgtcccacctgctcctctgattggccatgggctatgccctcccttcctcctgagccagcccagactcggcctggagcttggggtgctctgccaacccccaggaaggagccgcttgcctctgtgagctttctaggcctgggtagggaccaccccaattttctcactccctgaaggagagaaaggtggaaggaagggaaggaggacacattttaattttttggggggatcgagtggcaaagttgaagggacaaggcactgtgaggggaaggcagagcctcactgtgtttaaactactatgcaaaaaacaaaacaaacaacaaaagcagcttgccttatatcattgtggaaggcaggacctctcctgggctcctggcttccccctggagctgggagagaggccggggttagggtgatctgtgtggcagcactgactgggtagtgtgggtttggccgaggttggtcatgaggctggggttcccgcaaggcactggcctccctgaccgcttgcttccttccggacctctgggttcagggcgggggcggagggatccttgatttccctgataacttgatgttcttccctccctcgccagccaacaatagaggcttagagatctgtaatttctctgtgagaaagtctgaaggggccaggcctggtctctgctcccttctacccgccttgggttaggactgtccggcagttgcctgcttttggctgctggcaggagagaagcagggtgggctgctggcagtgcaggagctggagtgagggccatcctctttctgctcctcgacacacgcaagccgctctcagcagttccctcgactggccagtcggggtattgatctgagccagcatcccccaagacttgaatggcttgagtgggactgcgttgaagggcactgtgtggcccccttccaaatctcagcttggagccagctgagcaggctttgctttattattattttttaagcctactgcagtgggtctgttgccaattttaattttttattgtcccaggagctccctctagtggtcaaggtagcaaaatgtgcccaaggactagaacttgggtccctctgccttgcctggaggcagaaggagggggctctgggtttgactgggattgtggtccccaggggtccgtggcctttaaggctcttctctcttttctgtttcccccacctgtgttacagtcttaaaaatactgtacataaaagatatatgtagagagagagagagagcgtgagaatgtgttagtgactatgtgtgatgtaatttatcacgatttggtggccttcgtcatgagttttttcctttgttttcttttgctgggggcacctcccacgggtcccctgtggcagtctggctgtgacacttccatagtcagcatctcttgttagccaaacagttccctttgacaggtacttggagggacaatggttttggaagagagacggcccttctctctcctcactcacccttgttctaaaggttacagggttcaaacatacctgattcttgttgttattgttgttgaatttttattttaaccaaaggttatcagagccagttgggcttggacctcagctgctaaaaagattttccgtttcctcgagggcaggaaaacatccaccctcgtgggtctcctccgtccagggccgagggaggcattggacaatgtggtatgggagtttcgtgggcagcgtggaagccggccctgggttgttccccaaggtggtgggagggtgacagatatatctttagacttaagactgtaaggcagcagtgttagcatgggagtaactaaggttactgtggttatcggtgtccggcggtattatttttactttcctccttgtatacataggtcatttgtctttgaggactagggtactctagggagtttgaaaactgcaggagccagaaagagatcctggcctgagagtcccttctggctggcttttaatatctgctctcctcttgggagtgaggacttggggcaggtgggtaggagagggaaagccagagtgtgatgggcctgcctcctgggctggttcctgggtccggcctgcctgcctgcctgcctgcctctccaccacatgcttttttcagttaatgtcagtgggccctgcttgtcccctcaccatgagcccacagcttgccaagaaagaccccaacgctcgctggggcagcaccagtcctagctgggacgaattggtccatcctttgtaaagctgtaaatacttaattttgactttctatttctaagcccagtgtcatattgacactggtattttagaattttctcagatgggctctcctgcgctgccctctgtctcctgtttttgggggttttatacaaacagaggattggggagggataggaagactagcatccttttggctccctggttggttgtgaaatacacacacacacacacacacacacacacacactcgcactcctctgagactccgaacagagaaaaaaattattggcaaatcaacacatttttctttctcgtcttgagaaaatgtcttgaggtccctgaagggccaaatccatcgtggactaactctgtgggtagagctcagatgacctagggagaattaaaccacttamgcttggagtgggaggagagggggtggggtgggggagaatataagatgtaacttaagctaaatgtaatctatttataaagcaagagactctcatctatttttatgaaaggaagggttttttaatctagggtaggcagttgtggtagcccagcattttcctgtggacgagacatggtgcatgttgttgctggattgaatggaacccattcctgtccccyggcctcgtcttctgtcctcacttttggtcatccacacccatgagcagcttcagcagagtgtaggtcccacttcaccccattctcctctcctctgacccctcagctccttggaagtcttggggtggggatctgagggggtgggtgggctgcaggaaattcagaaatgtggtgggtgggggaagggacaaggcgcattagggagggaacaagctgggctctggggataggctctgattaattagttactctgactctggtctgccgagatccatttccaacccagttgcgttgggagagggttgggaggcagcagagcatgggtracagtgggagcacacgacttccttggagcctgggcctttgcgggtcccaggtggtcaggcagctggagcaraagtggaaatggcttaagatgctcatagcccagccccggctgtgtctactccaggccaagcctgggctgcagtccttgctatgttccccccagggccctgrggggagggatcagggtgctgggggtttcctaggacaggggtcttcccccttgagacaccaagctctggctctagaagagctctctcctggagtggggagtctggaggggactgggtgggtgcaggtaaagccagattctctctggaagggaattttctakgaatggatgatttccaggctcagggtgggctgtgtgttagttctgagcaaatccctcaccaagacccttccctcccaagccctcaaagaaatgaggcaaagcccttccctgcaagaccccttgtggaygtttttgcatctacctgatttttagccccacccagggagactttataccccatgatcctgccccaccgttgctgttgtctgccagctgggtctagcatcacagggaagggggggatttatactcayggaaagactactgatcctaccggaaaccaacctgtttactgtactgttgtaaatatcatgccctttatatcctgtatattggcttcttttaaataaagtgaaatgtcttagaactgatggtgcttttttttgtttttgtttttaaacagaagatgaatctggtgttgggggaggggtaggaggacggaaggccacagaaaccctcaaactcattagttaattagccataaaataggggatttcatatcacctgttacatttgtagctcacaataaaagctttggaagatgacaaagcaggaatcattacacacattttactgaaggggaagagaggacatgagacatcacaggctcagtaactggcttggcctggtttggaactgatgtccttttaaccacaaagcccccatttttccaggctctccaacgtgcccacaggaggtcaccttcccaggctctggatttgacagtaaccaatgttctagtttttcttgtcaatgggcatgttcagggcaacattgcccaaatgtgaactgagcccacctgtctagggttttctccaaaggtgaagacaaatagccgccaccaattccaatttgctttttgccattcctaatacttggcacttaggtaatctccctctcctactcttcatttaaatgtttacattctcccaaagtacctcaaatggtgtaatctggagaaaaataagtggcttaagatcacgggggctttgtgagttgggtactattacttccgttttacagatgaggaaactgaggcccggaaaggatatgtagtctgcctagtgccctgcttgaggaaccaaaatcagcatgggaactgactcctaagcaggtgcgcggttcatgctgctggaagaaatataaacaaattagaacagagagtaaggaaacgtaacattactttaggaatagattgggtccctgagacctcgtcatcagagaagacttcagaatccaagttttaaatagcattctagtgtttaccaagcacacaacattttgcaaagaaagctgaaatttttacttgggggtaaaaggctcaggaacaactggttttgcggccaaaggctttaaatgaaaagctaagcgttggccagctcaggttttatcttgcattgatcgtaatctgcaaggaagctaagaagctggccggccccgcgcctggagggtaggtggagagcggctgggtcctggccaagaagctggaaggcaggctcattccaggggccgcagcccccgggaagaagcagggggctggccgcgctgtggccctgcggggtcgaggagtctggtagcggacaggtttccagccttgtacaagccaccggcagcccgagagaagtcagtcggactcccatcgaacccggggcgcacgccagagggccggacgcagcgagtccttctgccccgcttcagcacgtgtcccatttcggttatctcattggctctattcagcccctctctgctccgctttggaaggctgccgcaggaccgccccgctgattggttcagaagctttggtgtgtcactctgactggtcgacagagttcacgccctctctcccgggtcataccataaagagaggaggggaaaacgcatgcatttcaggacttcgctttcgggttcccttgtcctgtgttgtgtaatgcccccgttatggcactagaaatattttttattagccgaagctaaatatagtgggactttggctgatcccgagctcggaggacagccggggtgatccgtttccccccgaggatcgaggtggtgcgctctggacggggttgtgcattctcgccgcgcccgggcggacgatccagcgaacagccccgcttctaacccgagatgctgctgccggcgcccgcgctccgccgcgccctgctgtcccgcccctggaccggggccgggtgagtgagcacggggcccggggcggcccgagcgcgcgcctggggcccgggagcctgagagtcactgggcgtcccccgcgccgcactccctccctgccggacccccaagctgcctcggtcaacgccgggttcctcaggggctcccctccgacccccacccaggcctttctcccactgagatcccttagcctcctccctcaggtagtcaccttcctttagcgaggggacccctcttcccgaatcctgcgaccgagtagggtgcctcggtggccctgccggttcccacgctcggaaagtagcctctgtagtcactcacctcactcctaatactggatcttcgcaatttgctggcttcccctgaggggcccttctatttttagcacaccacacatctcacttccccaccctcgtctcacgttcagtgtccccatcccgccccggattccccgagtcctctccttctaccaggatttctacctctctcttttccgctccccacacaccccgccgcccgtttttttttttttttttcaagttaaatgttggacagaaaaaaggattcctttcttcttgtaggtggaataatcatatttatagagtgcttataatgaaccaaatgctggccgggcaattggcaggtgtcttatgaggattaaatgagttaatacatggggagtgcactgaacagtgcccagcacaaaggcagcgcccggttattattattgccacgatcatcatcattatcacctctatttaaacttctcactcctgtgaggcaggtcattattccaaataatgaagaaacccaggagcagttcaggggtggacctgcccttcaaatcccgatttgcaaacctgacattgtggagccaggtgcctggacccttgcccactcaatgacaaatattctcagagcccctccagctcggagctaggtttggagaggtaggtgggacacagaccctgccccagaggggttcctagtctggtggggctgcccacctgtggatcagccccccctcccatttgaggtttgtttgcttgacccctggggctgttagtggcagtgtctttcctgatgagctgtgccctttctgagttaatcagtggccctctcccttcccccaagggatggcatggtggtgctctgagcacaagtgagttgcaacactgctgtgtgtcctctgtgggtgaagaggggataggaaagggcgcaggaagaggacatgggacagaggggttcctcttctaggctgagactggggccacacttgccatactccctgtgtgatcccgtttgcaggccttccctgcactctgagactcaggaagatggagcttatagagtcctgtgtttactgagtgcctactgtgagctggtgctctgccaaacaccctagagatgaggggtacccagggaatttacatggggtggggcctttgaggagttttcggcttaataggggagaaatgcataggaaaaccctccaatatctagtagaaagcaatccatattctaaaagataagcccatgataacaataatgattatcaagcaatcaagcaccatgggcctaacaccgagccggtaagtactgtctcattcctgtattatcatgggaaacgatctgccatcagagatatatgactgaaattacatttggtctaaatccagatttatgctctgaattatgaggcctcctgaattgagaggggaaagagaaagagcattttgcagctggttccctgggctcaagttacccctttgatacagcagctggccgcatgccctagacaggatttctcaacctcaccactattcgcatttggggctacattttggttgctgtggagtctgtcctgtgcactgtagaatgtttagcagcgtctctggcctttacccgctgcatgtcaggggcacccccggccctgacaattacgaaaaaaaccctggccctgacaggaaacacaagttcccagacattgtcagatgttacctgggggacaaaagtcacctccggttgagagccagtgctctagaggaacagctttgatgtttgatcacttgttcatttactcagtgaacatttagagcacacccgtgacatgccatgtctgcatttatggagaaacagtcgcagggcattttcagtgacatccctcagtgtcctacgtgtaaaactctagtcctgagaaaaaccgctgcttttgaggaacgggtataggagatgcttcttagtgttttcttttttgccttgagtgccaggaatctctgctagttttaaaaaatacccttgatacatgttttcttttagtttaatacatgtcaactgtgaaaagtacagataaggcaaaaaaatagaaaaatcacctggaattgtaccacacagaggtacccactgttaacattttgattcatgtcctttaactttccatgaatagatatgcttttaaaaaaaacctcatagaaacaagctcatctgcccatactttattgtagcttgttttttccctttatacacttgtctgccttacagtatgttcccaggccctggaactgtgtctggcacctggtaagcccttggcaaacatttagggaatgaatgaactaatcatgtgagcccttccttgtcaatcgatatttatcacggccagcctcaggacaatcaccataaagtgtggcctttataggtgggcccagggatggcagctggtgacaatgactgccatttacttttcatgtggattattttactcagcctctcagcaacctatgatgtaggggttaccacccccatttcacagattaaacaactgaggcccatggaaattaaggaaaacttgtccgaggccttgagctggtgaacaccaggcctcccaactgactgtctctttcctcctttaaccctgacttcctgtttttttctcaatcaactttaccatcagtatcctcagttctctttggaaacaggcaggatacagattaatagccagcccaggcatgtagtaggcttataagagttcacttctgttccttatttcttgtgccaagcccagacatgactccagctcagcccgtctgacatcagggggcttgtgggccggaattggttactaccgtgtcccctgcagtgatcctgggtggttttggactcttctcaggctacctgatggtttaattttcaaaatatcaaaagcacacaatgcttttcctagtctgcccagcccttggatgggcacagcttgccctgggtcgagggctggcatttcccaccattccttagacattctctgctcttgaactcctccaaccagtggctggggcagtgcctttggcctggaatgtcctgctggccacctcggtgagcccatccagtgctttgtggccttggcaaggcagcttctgtcccttcagtatcctcgtctgcaaaatggggatgattgtattaacagccacgtagcaggtggctgcaaggattagcggtgatgtgatcagtggtttcctggatgctggtaccgaatgcgtgctctgtgagtatttgagttggagaataattaaaacctgtgattatcatcacacttctaaagtagtgaaagcgccattgaggcagtgcttggcagtggcacccctgggagcagcctgcctcctgtgccctgcatctggcccggcacacagtaggcgttgaacggttgctgttgagatggtccagaacacagcatggcttggatcctggctccaactcttggcagctctgtggccccgggcaggttactcaccctctctgggctcccttatgttctcatatggaaaataaagatgacagtagtagtcacctcataggattgtcctgcgtgttaaatggtctcatacatggaaagcactttggagtgcccagcacctgaaatgctcagtaagtgctgctgtggttatgatgatccccctctcccaccaatgggcttcctggagtgatcatcttcgatcaggaatatcaagacagcagggcccagcagtgaaggatggtggcaggaggggaggtatggaactcagatgtcctcggtctcttctgtttattccaattaagtaccccagatgccaaacctcttctgttattattgttggtttgtttgtttgtttgttttggagacagagtctcactctgttgtccaggctggagtacagtgtcatgatctcagctcactacagcctcaacctcctgggctcagtcatcctcccacctcagcctcccaagtagctggaactacaggcgcacatcaccatacccagctaatttttgtattttttttttttcg

SEQ ID NO: 96774 - DNA, 648627 bp, Homo sapiens
  misc_feature (1)...(648627): n = A,T,C or G
ttaaaaattaactttcctaagctaggaaaggcatgtctgtaaaacttatttttgatttatctttatttttctttggaaaaaagttcatgcatttttaccacttttccccacctcctttgtggcggtgctctgccgctactgtcgctaccgctgtgatcttcctaacagaaatgacacgcagattcaaatgaaatttaatgttattctctgtccacttaaagtcgagggacaatgccttgtccttttgcagaatgacatcttaaggaacgcaggacattattcagtttgctttttgcttttgttgctgaaacacgagttccgacctctttgaggcagagtcccaagggcactgttatttggtagttcaggttatttggttacttcaaacttaaatgaagtgcgatgggcagctgaagtgttggtttatttgttatcccgtttaaggaaaccaattgctaaaacttctccgtactgacttaaagttttcaacttcttcccttttggcttttacactctctcatttatccttcgtttcagtaaaagttcttctcagtgtttgggagcgattgacagttatgcttgtccaatttatacagtagctttgaagtccttcctgaaagaagttagcgacttcaatatgaaatcatgtaggtctgaattgtccgcccggatggtgtaaggagtctttcaaagcgggaattcgaggttttaatagccgttatgatttttgcgtgggtgttttaaatactaacttctcgagcagaattaattgccttgtccttcccaagttcagggggacctctctccaggaaccgtgcgcgcctttccttttgcgagttcgcgcctcttctctggaggtgcgaggccaaagttagcaaagccgaattgcctttgctggttgcggtgcgcagggacattcggacaacacagaggcagcgactgctgcgggcaggtaagtcagccccacccgctcgcccctccttccctcccaggttccccggagctcagcgcccggggttcttgcgccgcgtggggctccaacccccaggggatgtgagcttatgagttcctggatctggccaccgtgcctgggtgccctctgctcctccgggaacttctccgagcccgcaggccggtgcgcaccaggtaggtggagagcccagcactttactttagcaggctgctgcgctctccgcctctccctcttcattggtatagccagcgcccgaggctttagaggaaacccttagatggcacccccgcccccagggccacgtgtcactcttacacagccagaagtgcggcatcgagaccccaaattttagtttccttcctttagggatgaatattgttacttgctccgggttccgccttatcaatatactttgctatcagtttattagataaaatctaaaaggggttcctgcggctccttttcggaaggttcatcgcggccgggtattagggccttcagtggacgccagagatcttgataatgtctccttcttttccttcttgcctcccgctagcggcctgcatctggtcggcagggtcagtcttgcccaccagaaccccgattgctctgtgatttaaagagacggacgcgctagtatttggaaagccaaacttgtcgcagcaaattggaggaacccagtcgcgctccagcctttccgtccctaatgtttcacctctctaggtggctcttccctgaggacttggtctttgagacttaatctacacctgtctcctctctgcaggcatttaggacaggtccttcaatgatgacctctttaggctttggagaggttttatggcccttgttgttgagttccagggcagacagctgaggagtgcaacgctctggaacaggcccaacgacactcttacacacacaggggagatctgactcctgtctgggctagaaacaccagtctgagcttgccccttgggccttagaggtcaaggggcccgcaggcagttctgggagccctggcctttaagagctgcccagcaaggtaccagggtgtacatcttattggcctccaggctctggcccctagagacagaatttccagtcctgaaagtcaccatggctggtggagacacaagatttcttgctggggactaactcctcccaaaaacatcaagtcagtttaactcacagtccccaagctaccagtcttcaagcattgtatttcctagtgggccaggagcatatgactatttcttctgccccacagatcctaggagctcatcttcactcttatctctttttttatctggagtttgtgtgaaaccaacatggagtatattttaaaaaggcagtatatgatcgacagctcagcttgttccatcttctgtgcttgcatcctgtctccgttttcttcaaagataatgtaatagagatgagactttctcccctttgtctttgatcacttcatctgtaggaggtcttccccatgttggcaactttagattgccatgaaactttctgatttctccaatcagcattcctgactcctcttttggtccatatgtcctttcacaaagtctctttcgatgaactgtctcaaagtggccatctcatatgagtttctatacagtaaggatctctccttcacaaatctctgcaggttatgctggtgcttcagaacctctttcccagcttttatcttgatgtagttttgactttccactgacctcagtttctcaaatctagtctatttctttgggcctgggttaaggcaggccaacctcaccttgtgcatactgcctctagttagccttgtgctgctatcaaagctagttttctcatctatcttttatattctgcatctctactacctgagaccatgattattccctgtcctggtcctccagctttttttgcactgagattaagtttcaggtgtctacttctttatgacattctatgtccttcaaatctataatctaccctacacatgactcaaagggaatctttatttaggttttgtctgggggtcttttattaacataattttctacatctgacttaggcatttttatatgtcatcctgggtgactgaaactgttttcatcttcaacaacctttaaaccacccctcttgaaattgtttctccaaatcttttcctctacaaagttgaggtaatatacatatatcatccactcaatcccatacaatgaagacttatccatataacagtataacaattgtggaattgttttatttattgccgtgaaagtgtaataattttttggtgatttgtacatgtcctgttatttataataatttgaatccataaactatataatccatatggcctccagaacactgccacctacatatgttaggaatctcctgtgtgaattgctttttcttttttttttttcaacgcctcctcctccatcgtttaaaatgtttctcttcccccatttgctgagatcctactaagtggtgtgttttcatcatctctgcttccttcatctctttcttttctctcttttgactacttctttttttcgttttccttcatccttcttattgttcatcctaatatccacccttcttgtcttctccctggcctgcctgtccttccccttctccgtttgtctcgtgactcgcttttgtggtccagttctatctcttagtacttctcaacattcagcccatgcctccttctgtcacctaacttttccaaagcacaagctaccattcatacattttcctttaccatttgacttcctcactttctccagtttgctccttttttttctccccgagttgcctaccttttccacgctacagtttgcctttctcctgactcctcctcccagcagccctagccccaatagagctcttttggtcgttttcccctcagcctgcctctcccccacctagtacttgtccccattctcctctgaccccgactttctctcttctttgtctccttccagttctcccctagtagttgcttcaccgtctctttccaggcgctttccccagttccaacctctggtctcgccgatgtctctgccctcctctctctttgcggctctctcttgcctttgcctcccgctctcccctccttcttcccccggcccgccctcctccctcccagcttctctgcctggctcgctgcctccctcgcctcttgtctcatcttgcctgtgttgtctgggaggggagcccagcctcctctccctcgctcagatcaatgccctggccactcactttctgatgttgcacgacgggaaatgctttgaatacttacgacatggccgctcacactgattgccaagattgacagcactaaccatcgccttcacttgttccagggtgaagcccctagtcaccccgctccgcgcgcacctcctggaaccccggcggcaaacttctgccgctctgcgctgcccccacccggggcgggacacccccgcagacttgagttaacgggctacgccggccgcggcgctggggggttctgttcccttgctccccggactgtgacaattgacctagcaccgactccccttccttttaattttttttatttgtatctttccctttttctttaatgccatttactcctgcggcgcagcgcacaaggagccctcccgcgcggtaccatcctggagcccgcccaggtaaccgggacggagcgagcgatctcgagagcgagggaggcagagccagggcgcgcggcccgctgtgagctacctgttggggcgccggagggggcagggggcaggagcccagggccgggccgccgtcccccggcgtcttccgctcctgcccttccgggcactccagggttagtttctgtgagctgggaccgaggggctggggcaggacaggcagagggacgagagccgagcgagcggagccccgagagggcgcgggtggccgggagccgcggctgccgggccggggcgggtttgcgtacttggctggggaggggaaaggaggaggaggagcgggaggagggcgctccgaggggccgacgcggagggggagtggagggagagaaaggggcccgggcgcccgccgctcgctggtggacgcgctgatcccgaggatgcgtccccctcttggagagttgcgccttgttccggagtgacagatctgcgtggcgggggtctgtttttctccccttcacctcccctccaaaaaatccaccctgagaaaacacatgttgtagccgtagataactgtgcgtaggacattaaggcaaaagggcagggacagggacacaacgcaacctttgacaacagaaagctgttatcgccatcctaagtattcgtccggaaatctgtctgccctctcggcccacctcactcctccacctccgcctccccgcattggtattctaatctatataattgggaatgatgtgaaaaagaagtcaggtggcttagagaatgaatttgtaagtctccgtgaagttcgaggtaggtatttcattgaagttcgctcaagtgtgtgatagaggaagcttttgtggctgcgtgtgtagtcatccctcctcgttctgtgaaagcaaatgcgtgtcggctttgaaggttcagatgggaccgctaggcggtaatgccctccgtgcccacaagagggcaacatcccgagggctttgtgagcgctgtatctcttgttaccgccgcaggcttgggtttagagaaagttacactgaaacttttaaaaaactgataccacctcttatttcgcgatactaaaaaaagaaagatataaaggaaaaaaaaaaagaaaaaagagggaagtaaagagagaagagagaaagagaaaggcaggcagccagcctaccccgggagagccctagtcacaccgagactagggggagggctgttttaattgtgggtttggccgactgacgactggagtgccctcctcggctgtcttagttgtagccggaggtcatgtaaatcgaccttaaaagaatgcataagccataaattaaaataaaccctcatccaagggctgatccatacgtagacaatatccaacctggacaaaacgggcttcccttgcgagccgacctaaaccgcatcccccaaagaatagagactaaatgcaaagtaagtttcctagcaaatattttgttttcttgaaaagtgttgggttgattcgctgtgtgactgagacgccacagtgttcggagcgcttcagtgtcacccaggctctgggtgcgggaggtcgggaggacccgctgagcttctgggcttcttaatgctacccccaccccacccccatttcggtttggaaacttaggctgtttgtggggttgacactggttgagggcgggcgggagtcgaggatctccgccgctctctcgccgggataaagtttactcggaggagttcatgaagaaaacccgggtcgctagaaaacgcttgcgctccctcctcccaccctcaccccaccgccgctccgccgcaactttttcgggacaccgctcgagttgcctccagctccctccgcttgtcgcccttccttccccctccccccgtttttggacagtactttttaatgatcttttcaggaataaacaaaccgaattccaagcccatccgaaatccaaggctgactgatctgtggtcctctttaccctggccgcgagggcagtggtgcctgacctggcgggagcgggggcgaggggtagttcagccccgccgggcgcggacttcgccagggagtcacccggccgagcgcacggtcgccggcacgtttcttccccgccccgcgtccctgagcccagccggcgccctccgtccttctcggcgccctgccggggccccgccacccgccgttcctctgcagccggggccgcggtccgctgctcccgggctcggcccagggcagggggcggtgctgccacccgccccgggacccagcccgagcccggccgctcccgcgggagctgctttcttccttctcccttaaagggccgggcagagaagggaaagggcttgtgcaaaggctgctggggttgtgctccgatgcggggaggagcggcccggggctgctgagggcagattagctcggtgccgggctgcttccccggcgctccgcagagctttaagataaaaagaattggtgtgttcggagcagataaaaggtggcagtcgccagcttgttttgagttttatttacggtctcttaggcggaccaagtttgaaaatgttgttttgtgtgaattgtcagatattgaatgcagcccctatttggggactaaaaataagtcttcgactgaactggcggggctgggctgttagcgagatgggctgtcctgggctgcttttgtgtgtgagaccctgtgagggccgcgcttgaagtttagggctagaggtggcccgaagccgtccttgcggcaaactgggctgggctccggacctcccgctgtactgtcaatgggcgctcggatgacgtccgcgtcccgggcgccggtgctagccgcgtactcctgcggccgggctttggccctggctgcacggcccagccagcaacccgggggagtagagatgagagagggcccctctactcccgcccactagggtcttctctctcctgccctttctggtcacatgtccaggtttttccccgggtcccgaggagaacagacacagccccgcccagtttatttctaggaggtgggtttggtgaataaaaaaggtcaagtggtcaggtcggcgagctggtccatggcgaggagggacaggacggacacctggcaagtcctgccctgcctgtcccccaaccttggtcggcccgcccgcgcacggctggcctccctaggccacattcttgcacaaagttcgagaggctgtgggaaaagcaaccctgaaccggccaagggccggcgaagctgatcccgcaatggcattttgttttgaacagttgctggggttgacgtttcctcataaggtaaggtgtcactggacagtcggctgcccaaatgccacatgtataattagcctgcgcactcagcacctcgtccccgaggcccgcaggcacgggcttggccgacctggtccgctcagctctgttctgggttccaggattcccgagggagggccgaacctgccagggcagcctcgggaggccgtggcagagaagaatgtgacagtgtagccttgtcttggatttttttttaatcttttcttttcttctcttcctattttatcttcttatttttcggctgttcaactattggtaagaggggtactggacaccagcgcagagtgcagactgaatggggaaaggagatgcagagaaaatctggcaacatacctattcttcacatcctactcgtgggggagggctgctagtggccctctgcaccaacccagtaagaccattccaggcttggcattgtatgtcctggcttgggtagggacttcatgcttctaggttggattgtttacctgtctctgtgctccctcccacccccactcccaaaggtctctcagaagttaatatccgtgctctgattgcagcttctggtttccccctccaggcctagccgcttggggctgctagtgatcactgtgggaaagcctgggcagatctactgtctttccctatcttactctggttcagcctggggttcttaggagcagtaagtaccttgttgtttcttgagcttcctacctggcttcccagatcccagtgtcaggtctgctttagcctgcactttctggcagagaccagatttctgcagccatgaacatgactttccctctgttaccctgtgcagttactctggaattcaacactcaacattaggcacttgcatcagtcttcctcctccccccttgtttctaggccactcagatatgtctgatacctactagaagactcttttttatttcaaaacaaacaaacaagcaaacatcctaaatctttcacaagtttagtgggacagggttagcttttcttttttttttctttttttatttgagacggaatctggctctgttgccccggctggagtgcaatggcgtgatctcggctcactgtaacctccgcctcctgggttcaagcgattcttccgcctcagtctcccgagtaactgggattacaggcacacgccaccacgcccagctaatttttgtatttttgtggagatgaggtttcaccatgttggccaggctggtgttgaactcctgacctcaggtgatctgcctgcctcggcctcccaaagtgctgggattacaggcgtgmacagccgcgcccggcccagggttagcttttctatggcagcaagagtgcacctttcttggtgggaaatgaggacacggtttattaagttgcatttgcttttcattgaaccgatgaaatatttcactttcttgtaacaggagaaaagttatgactgatttaggtatcttccgtgcagttttggaagtatcttcttgaatacacatatgtgagcacatgggcagtaggccaaatgacatgtagtttttttccttctacagttttgaaaacctcataaatcaagagaaattgtccctcttaaaaaaaaagcaaacaaccaaaaaacaaatgtttcaaactttgaaagcaagtgtgcatcacaattattaggtctagtttaagaccaaagatagtaagtaaccaggatcccgatatcaagtaccagggcattaattccataggcatagtgacatcctctgttgcttttctcatgtatcaccaacacctcgtttctcttctcttgtccaccatattccttcagttatagtggcaaaactagatagctttttgtttattgtttattctgtttattgttgcttttatttgatgttttggaagtcatgagaaggaacattctcttggtgaatatgtattttttaaaatgcacaaaaaattgagttctttattatggagcatgatataaatgatataatagtatcaagtacctataccttaagctgattctataatggatttggtaactgaatgcctagaagaaatgagattaagtaggaaaattatattgtctgttgggcattttttcagtagtagcagaaaacaacagatatttttcattttaagggaaaaacatatatgtacaatatgttaacctaactggcaaatctttcttttacaatgctctaaacaatattactgtaaaaaatgataaaatttgatggcattattgagattttatgtctgtttctatttgaccttttttaggaattatttagttattggtcactgatgaaattgctacacatgtctatcttatattgaagatattagtgacttttaaataattttctttcaattagtatagtaggtactggaataaatgaatttcttttgaaaaagataatatacattggctttaacacctacttttaatattttctatgcttttctgttttgttcggttatgtatctctttccatgtttgaaagcattctcttgttagtgagagaattcatacatacatatatttttcactatttacgaacaactttctatgaaagtatagaatagtacaacaaaaattttggtttatctaagagctatttgttttaatatagtttagggatgcatatatatcaattgatgtttttcaagtcaagtgaaacattccatcaagctaatgtgtctgagaataccatatcaggcacagacaggtactagaaatgataaaacacagataacttacagcaagatgttttgcagatgggatgtattatctgctctcatgaggttagataggccatattaccattaaaaaattaatcaagttatttcacaattatcaagttatgtaggtatatgagatttaatgataacagattttattatagaaacctgctaaaaatgaacattcactgctgtttagaggaagaaatggaytatctttgggtttggatttcttcttaagaaatatgtctctcctctgttttttttcctaataaggaaaataaggtattagaacagtttatgtattcatcctgactgtatattttctactgattatgccctgaatctcaatattcaagtaaaaaaacctagtgctcctatatagtgtaggaaaagcaatttatattaatgtaagcccagtttaaatgtgtagcatatccttttggcctgaggtttttcaaatgtgatccgaaaactcattgttttggtgagcgttgtgtcagaaactctcccatcctttcattatatattcattatttattcacaggaaagtgtttttattttccttgttctgtggaaaagggtaaaagcttttcagttaattattytgtttagacatttaaacaaactggaaatagttcaaaatttgcattatgggttttgatagagcttttcaatttttaagtattcattgtaatagtttggatagaaatatcagttgaagaaagtgggtggagggtgtaaaatggaatatcatttaaatctactgcagactctctcagctccaaaaaagagtgctggtctgtttttcctcaaatctgtggtagtcttaaaaaagggaacatgaaaccctaaaacctcagagaagcagtatcgattcagttcctaactgcaaatccttcatatctttgctcaaaatatccaactttacaccaatattagccattctttttatagtgataccatgcttagtaaaaaacttctaagcactgaggtcaggtgttgagattggattctagtttattttttatgaatcagataaagatttctgtgcatgagaccatatgtgaagatgagagaagaagaacatttccatatcaaaggcaatatatctgaagctgcatggtaattaaaatgcagtggtttggactctgtgcactagcacttaagcagagcattgctgggaccttgtgcatcatgcaggcggttgcctcttgcatacttcttgaaatacacttataattttgtacaaacatttatgccagtccacacttttctgtggataatttgtatttcatccaaaccattcaaagtagaagttattttttgagctaccccctcattatggcttttgtgcatcaactatttttattcttcttgtttgtatttctttttaccagaatgatggcttgtttatattcagaatctcttcttgctcctctaagacccctaatatatcactcatattttattattcactcaaaaaaactttcatttttaggaaagatgtgagttattttctgaggttaattgtagatgttgtaatctattataaactaataaaccacattaaaaatcaactgcctacttatttctactttataatgctaatatatttagtaatcctcacaaacttgcacaatacatatattggaaaaaaatccttttttaaatacttaaagaaaaattctgatatgtttcttttcatttaaatggcatgaaaatgtgtagtggcattctctttcatgatacttcaagtgaacaacaatcaattgaaactatggaaatctttatatttatctaaagagttatctctttccatttatagagggacgtttgattttatttgtcaataactgagttaatattttagactgtaactatttggggataaatagtgaaatacaaaatctaacaattggtagtcctgtgctgtatatattttagaaatttttgcatctttggtgaccaacttcaatttgctgctctgtaatctactggctcttctatttctgtatttgctctctttctacgaacattttattgtggtgtgtgtggcgaggaattcattgatgtattttatttactaagctcccatggtctataaagccttctaaagatttctctggattgaagcaccatgtattgaagaagcctaacgtgatattattaaatcctttaagagttttgcgtgttttaactatttttaatcaaattacttaagtatattgatttgatgctcttcaatgatgatacgtataaataggcataataaatataagataaattcaaagtgcactatgtgatgtgcatattacagtgtatacaaacattctatgttctctcggttctctcttgatctctttcttctcagaaaaatctcccacgataacccttgaaatgatctgtcacccttgctaccttcaataatttgttgtttccagtcatcttaaagagacraattgtctatctttgatatatccattcacatgtaaaaagggactttatgctgtttgtgattttgacttcaccgagcacaatttctttgcttctttgaaaagtggttctttaaaattagacaaagaaaattaaagatgcttcactttccaaggccacacaagccccatatgtagaaaaaagaaaatgcaacagattttttttttttttttaaagagcatactcattcccaggcatggttgcaaatgctacattttatactttacaaataggtcattgaataacataaagacttactaagttctagacaccctgaagagcatttttgaagccacgagtctttacttttaaaggattttctcttcttctgaagattttcatagttggtaggtggagaaacttaggtgtggttgtcttgatgctaagcaggttgttgataaaactgagtaagaatgccctcagctaagagagagtagttcattgcattttcttgggaaagaatattgaaggtcaggaatatttttattttctcaaaataatttccaactaggtccatgggcattgaaccttctgtgtatgagaagtcagctcctctcctcccaatatatccatggtataatccctaagcctcagtttccttatctataaaatgggaataataataataatacctatatcatagggttgttttgaggattaaatgagataaacgaatgtaaagcactaagctgagggattggtataaaataaacatttaatacatgttatctgttatagttgaagtggttctatacttacagttatctggatctggcttcccattccagctttactacataattgctatgtaatctttgggaagttacataacttgcttctttccctcttatgtaaaatagaaatagcaatataggttcttaactttctttccttgaaaggagaattaatctatggtctggaagacttgggatagagtaatgactaaatgtagagtttacatgttcaacttctcaaatttgataaaactacaattctaaggcctagaaaagagtttgaaaggtcatttcatttgtcattgctatatagtattgatcatcctttcttcattctaatcagttaagaagttctctttattttgaaagcctgccaaaaggagattttataatctttggttatatatatcaatgattaacaccaggatttctttttgtcaaatatacccatctcaatctgttttgttttgctttcattttaagaaaaaatgaaagcaaacattcttcttcatttgaatgacagacctatatgtgtgaagaccaaaattaaactttcaattttgattttttgaagattttcttttgttttatttgctaaactagttgtgtgaccttggaaaagtaatgcaacctccccaaatctcaattttctaattttaaaaatggggatggtgatataatttattccatgggttgttagaaaggttaagtttgaagctactgtatatatatttaatatatatatatacacacacacatatacatacatacatacatatatatatacatataagtgggtagaacagttctggataacggtgttaggataaattgacaatagttatatgatcagtacaagaaccatggcatgagaaagtctcttaattctcttatatttatagtactcgtcagcctttaaagtgccttcatattcattgcctcattcaataaaaggtatgtggagtagataaacttaccagccatactaactttctacttgatgtgaatcaatgtttcaattgggttttgcttcaggatattatttacttcaaacaaagcttgtatgtcataagttagaactggcttttttggccctcttgtttccccatctctttgatataatgtcagtgctcatttattgtattttcatacttacttccagagccaaattattgctgcatttcccgtacaccaatgtaaaagaataataccatgctgatcagaagcattaaacatcagttctatatgtctttgattaatacaaattagaaaattatgtaataataagtgtggcaagtttgatagaaaacaatctttcaaaacatgagkttcattaataaaagaatccttgatggtgaaaaggctgagaagaacttgattacataatttcaaagatgaaaatgcattgtactagtgaagaggtatggatataggtgattctgtacagtgtgctaattactgtcatggcgttatgtataacagcagaagtacctatgtcagggaaagcttctagtaggagatggcctttgatctgtgatttaaaggatgatgaggaactggctttaggtaacatcctaaagagcactgaacatgggggaacatttgacagtataactagcttttctgtagatctgacactgaaatgtctcgtacatgtttctttgtgattcctagaaaggctgtgtctgtcatgaatgtgatatggacataagccagcagcttagccactgcacttctctttcttagctcagttttgtggtcaggaacattgtgagtgcattttaaggtacagaggaatctttcaaattattactttccttcaaatatgtcaactaggtatgaaaattacagtaagtggcttattaatatatgaactgatgatcagggctgtgagttaataaaatcttgtatcttacactgtaatacacttttagaaaatggacaagcatgatcttagagaaaaagctgtgtctgaaagcttttagatctaggtgttatttctgtttcccttatgtgttgcagctctttaggtgcctcatatttataattaagtttttccaatggcaaagttggtgtatatcataacttcttttttattgagggataatatgaaaataaattaatcctcagagtggttatttaaggtttttggaagaaatacaaattataattatmcaatgatagtgatggacagtagtagtggcagaagcagcagtagcagcagtaaaccctctctactgataactttccaatggggatgataaatccatttattaggtttttgtttttttaatctttttgtttgtttgtgtttttaagagacggggtcttgctctgttgtccatgctggagaacggtggtacaatcatggctcattgcagccattcctggccttaagcaattctcctgcctcagcctcctgagtagctgcgactacagaagcccatcaccatgcctggctaatttttttttttttttttttttggtagaggtggtatcttgttgcccaggggggtcttgaacttctggcctcaaagaaggcctgacttggccttccaaagattataggtggagccatcatgcccacctaatttcataatctggaaactcatgttttctaataacttttgaatgccttttctctgagccagcaggccttctttcatatttttagtttggaagctctctggtgtttaataacttgtttctccaagttaaacacacttactgagttttgcagcttatatgactgcgacataatcactttctgaaaagagattggtggtcacataggctagagaagctatggccgtggtctacaatggctttaacctattttcctcaccaccgctttggcatcctggagacttgcattgttggtaatggcatgaaaaaaaaatgatgaaatctctacattaaaaagaaaggttctgaaatttagtaaaggagggggaaaaagacgtgaaatttatagaaaacagtttaaaaacatcctcttagtcatattaaattagttatgatgctaaaagcatcatatttaaagaacatcttcctttaagattttcaattaagttccttaataagaagccaaaaccaggccgggcgcggtggctcacgcctgtaatcccagcacttcggggaggccgaggggggcggatcacaaggtcaagagattgagaccatcctggctaacacggtgaaaccccgtctctactaaaaactacaaaaaattatccaggcatggtggcgggggcctgtagtcccagctacttgggaggctgaggcaggagaatggcgtgaacccggcaggcggagcttgcagtgagccgagatcacgccactgcactacagcctgggtgacagagtgagaccctgtctaaaaaaaaaaaaaaaaaaaaaaaaaagcaaaaaccgaaaagaaaataaaaattgaaagaatatagcagctgaacaaagtttaaataacttggaaaacagcatattaatcaattgagtctcaggaacattttttacccttgactctggagacttaaatacatatggaaggaaaattttattgttttaaaatttcttagctgtagtcctttcccactataacaatgcacaatgaaagtagatatattgaggtttaaaaaaggattgtaaccttgcaacccttaaaggcatttttaaagaaattgttagctttttgatatcagattctttaaatgtttacagataacagtaaatccagagaatgcgtccatttgtagtttttgtataggtttgtgtaattttacagctatgctaatgtgggctcatgtacactgaatacttttgacttttgtgttttaaattgtatgnnnnnnnnnnnnnnnnnnnnnnnnnnnnnnnnnnnnnnnnnnnnnnnnnnnnnnnnnnnnnnnnnnnnnnnnnnnnnnnnnnnnnnnnnnnnatattcttatgtagggcatgacagggtaaagaatgagaaacagcttgacttttaattaacaggtttggaaaacaccttgggccgttttccaaagcattcataattagctgtgtcttagttgtgaagttttgtgtttgmtttctttgttatgtccacatggaaagctcatcaatgttatcaggagctgtgtaaatagagcatataaaaagtatacccctttatattgtacatgaattttttcttttttaattctgaatttatttgtataaaacaatactgttttaggtgttaagagcttgggcttttgaatcagcacacccgggatcaaattttgttctaccatttacaatttatttatcctctctgaatctatttccttaagtgttaaatgagaatattaatgccttcttcctaggatattgtgarggttgaggagatgatgtgcataacacacttagtaccttgtttggttcataataagtgcttggttgtcatttttctatgaaagtctgattacagtacaaaaatatcactttatgccctttgcattcattttcatattgaaagaaaatggtataattaaatacttgggaagaaacttctaacatatatggtgagcattctgattttttttttttctaaaggtggattttgatttgttcaacgttcttcccatcgtttatataagcaggaataactcattttaaaggtgatgaaggccaaagacatagtctagaaatccatggccttggtgtctttacttttacgctgtgttcaaagctgaccatcatcatctgtgaccctcaaaatccatccctgtttataaagagtattccattattcatttgtcatggctcaccctgagtaaagaaggatgttgggaagatggtgggcactcccctatttccatgactccttgccacttgttcttatcagctctatttaatgtgctttaaacctatcccttgaagttttaattttattatatttttcatttctgtgtgttcaaatgattttttttcaaattggtgaggtaatctttataggcagatatagaaatatctatatgtgctttatgcttatcttttatttctttaacctatttattttaaaatagcttgctgataactccagtatctataatttcactacmgagagccatagctggtctctgctttttcttaagattcttgctcaaggcaccttattttctcttatgcttagctgttttgttttgtttttatttcaatgagctgatcatgttccttggtatattatttgcagggattctctgaggcctagaataaaggggaactcttgtggagaggatttccattagccttgccacgttcttttgcattttcttagtactactttcacatctttgggctgttattcttcttttttgatttgtatatgtgctagtttctgcaatttaaatgccaataaaataggacatttgtattaatgttctttacattttatgaggctatgcttatatagttattaattttgctcatttaacaagtttatatctgagataatttaaaagacaaatatgattttattaaatttagtaagggaggtgttaaattatatggtcattctaacttgtcccaaatgagctgtctatttaatatatgtatttaagtaatatgtatattactagtgcatcttaaaagtaaatatgtttgataattaataaaatgcttgtttcagtgttatcacatagtaacctatagctggtatcttccttgattgattggagtgaatgtaggaaacattttcagtacctgaggtcaaaggggcataacttgggatattcatggagaggaaatagagatcttaggcattctagatagcctaaatgcagctggagaatattgctggtaaggttgagtctggaagaattcctctggcaagacaattttaaggtttgttcgggagaacttctgacagaatagtggttgccacattttggatagagcacgcccttagcaaaacgctcatgaaccctaatacatgtacatatgtatttcaaattttagacatgtactattttgctaatatatgttataaacttgtacatattgtagatatagaaaagaaagagatatagatgaaataatattttaaaatgaattgtggtctcccaaatcctataatcgaatatgctttgttatttttaacagtctcagtttaacacagtgtgatgaagcaatttaaagatctgattctaagtttattttactttgctacatggctttaatgctgccacagctgaaaatgatatctcagaaagaaaaatagatccaaatgggagaagaacatcattgattgcacaaattgattacatacaaatgtatgcaaataattttgttaaaatttggcttgtagcctctgtcttccctgatgacaattagttgtttttgccaatgaggtcaaaggtatagcattttaatattttttaataaatggactcaaaacctgttgaaactttttggaacatcactaaacaggttagaatattctgataccaatttttaaattgaaaatagatgaaaatttttgtaagtgatagcatagaatttttggtaacaaaattcacaccatgatggaatcattttcaaacatgttttcaaaatattctttcataacataaatctgttttgaaaagcattcaccttctcatttgataaaatatcacctttgccttgaagaccagattaagttagtttgattgcttctatgtttgtatgtatatacctaattatctttctgaaatctatctatctatctatctatctatctatctatctatctatctatctatctatctatgtatctaaccatttatctaatctatgtgtttggtaacacacactcacagcttcttgtcatcacatgaaagttcagcacatttggtacattagttttattctcaggtttggaaactaccataatataagcagtgaactgctggatgctgcaaacaattctcatgtttatgccccttctcatttcaaagcattgtaaagattttaccatggtatacagacctttttaaaattaatttttgtggttacataggtgtatatatttatatggtacatgagatattttgatacaggcatacattgcataataatcacatcagtataaatgaggtatctatcacctcaagcattttttctttctttgtattacaaacagtccaattatactttagttattttaaaatgtacaataaattattgttgactgtagtcactgtgttgtgctatcaaatactagatctatctatatttttgtaccattaagcatatccacttgcccacctccctgactacccttcccagcctctggtaaccatcattctactctctgtctccatgagttcaattgttttaattttttttttaagctctcacatgtaagtgataacatatgaagtttgtctttctgtgactggcttatttcactgaacattatgacctccagttccattcatgttgttgcaaatgacaggatctcattctttttgtggctaaatagtactccattgtgaatatgtaccacattttctttatccatttatcttactctaagcctattttttaaagtaatttcattatcatgtagcactgggcttcaacattttgctacaattgcttgattgtgaatgatgtagttagtgaagtccatggtactatctctgtaatcttatccctttgttcctttagttcagctaggacaaccacttcaccagtgggttcacttccttagttttccttaaaaatttttctttcttaaaaaaggaacttgttgttgagatggtatctttcctggtacatatttaaatggctcactaaaaattagcactttgcctattaaatataaactgaggcatgttgagaaatatgtacattcattcatctgaaaagcaagcgtcctacctgacatttctttttgcaaatcttcagccaagttttctatgtgtctttcaacattttggcagtaccacctatacaatgccagaagacatcattcacactgcattctaggtaaatggtgactccagagttttgcattacgcagtgctgatttttagttaagggaatgtatttacgtttgttgtcatattatttttttgtatattattttaaccttttttatagcagcaggaagaacaagtgttattctgatagcatgtagcttttttatcttttataaaagaatttcaaagaggtttcacaacatttaactttatgtttggtgaaattttgtaaagtactgattgagcattgtatgattttaaacattgttggaaaaattgcagcaatatagatttatattgatgtgcttagtatttaaatatcttgctgattgtaaagggttcatattgcttaacatctgaaagtacaatagggcaaagtatattgttaatgatactagatataaatctctatctcaaattgtattcttgatgattaaataaattttggcttattttttgtcagatatgcatggatcatcattgtttctatcctgtaatatgcctgctattgagctactactagttgtagaaatgtcagctttgtcatggtcttgttatcattaaggcctacattattaatattatccttaagctatagtttttttggaagaatcattttaaaccacttgggcatttgttcagggttaatttagtaaaaaactagattatattatctacaatcattctcttttctttacccaggatacttctgatattggatgttgcacattaagacatatagactcaatctgtcaatctgtatttaaatctaggtaaggattaatttttcttacatttaaaataaataaatatactgcagcatatttatgtagtatactcctaggatgtatgtacgcactttggagactactgaaatagaaaagagtggaaagagaggtgagggcatgatgagtcaaggaggaaatgcatggtctccagatgacactcttctgggacatagtccctctgaagaatgtagccataactggaaacctgggacaggaagtaggactacagattgatcagtgttgaggttcaggaagcagtagtatggtatttttgtttttatttttttgggaggggattggtctcactctgtcacagaggctggagtgcagtggcacgatcatagctcactcagcctcaaactcctgggctcaagtgatcctcctgcctcagcctcccaaagtgctgggatgataggccaccatgctgtgctgattttttaatttttaaaaaagagacagtgtcttgctacaacgcccaggctggtcttgaactcctgacctcaagtaatcctcctgcttcagcctcccaaaatgctgggattataggcttaagccatggtgcctggcctagtgtgacatttttaatatgagaaaggaagcagatttaayccatcttttattctttaaggcaaagcagtttgagtcattttgttggtgtgagggggtcagcaaagttccatagttaagtgtatttatcatgttcaggagaggggggtcaagtggagaattactactctcctgagtgtctggggctctttgttgtttctgcacccagccttccttggatttagataaaatcagagcagaagctgggaaaggacagtaaggcagcacttagggatggctgtaggcaaacattattatcagtactctcttttcttcttttctctaactcgttggtatatttcctgggcaatttgctatagtagcaaaaatccagtttgggagtttcagctctaccaataaactttgggtgactttggctaagtcacttctctctaggaattagttctttcgttggtgattgggaagtttgatgatctccaaagaggtttgagctctgacactctgctgatatccatctgggatagtgttctgtgcttcccctttatatagaactttcaagcaccatgtccactgtgccttctaaagtgacaaatgctaggaatttaatttaatatatgaattcatgctagtagactcatgagcaaaaacgataacactatttctagctgcttcccttcacttttccatacagcttttcatagagtatatttccatagtgtgctcctggagagtgctcttgctttctaacctaaagtgtctaatgagaactttagaaagraaggaagtgttagcatctggagggttgtgcctgtgaaggaggttgggctggatgaaataggcagggcattgggacacagccatcaattcattgcgtgtgtttggctggactggcagcagtggccagtgccaggttttttgagtatggtttctgtcaccagcagagttggctgtctttgaagtctgttagttaacctcttccagaatcttggagtgcaactagcactcaagagaaggagrataaaggaatctctaggaataaataacacccctattttcattaacaacttagttctcttcttacaccagttttttgaagcatttaataaatgaacagatttctgattttctcactttcttttcagtatctatttatttccatggatggagataatattggttaatgaactggatgcatatcaccaaacatatattgagccgttaccacacatagacatatttctggatgctttcataagatggtgataataatagtacctatatactattttttgagaggttttattaagctaatacacttggaacagtacttgatatgttgtaagctctcattaaacattagtgattattattttattatttaatctacacaacmgccctgggaggtagatgtcattattttagttttataggaaaggaacttaaggtttagaaaggaaaaatgacatgcccargtttacatagccattaaatggcagaaccaaatctaaacctagatatcctgccttgaagttctatggtatttctgccatataaatgcagctctctgtaacatgcaagttaagctaagarattttccccaggtaatctacagaccagataataaggagcttggataatagggataataaggaactgaacatattattatgtggtgttgaatttcagcaggtgtgkttattaaggcagtccttgctttgcatggcatggtgttaactgaaagtcttgtacatcataaccctgtcttcactttgtatagctctgatcccaactttacacaattctcatgtcatagtttgatctcagttattacagaatcatgcaaagtggggacatggctgcactatgcactagtttcagttatggtataatgcaaaacaaggactgtctgtacttctatgagcttcacattcatataaagaaattctcaaattatctttcctttggaccagttagataattcatttctatttgataacccattatcttttttccttttctttttttttacagacagtctctcactctctcacccaggctggagtgcagtggtgtgattacagctcactgcattcttgaactcttgggctcaaaggattctctcaccttgtcctctggagtggctgggactgtaggtgaacaccaccatgtccagctaatcaaaaaatttttatttttatttttagagacaggggatctcactgtcttgcccaggctatcttttttcttctaaggctcttctcctgctaagggagagtactgtgttgcctaagtaagtccttgaaggtcactgatggttggctcttggcttttaggcaagccatctctgatatttattgcatccagtagtaggtctctctctgtatttagacagaaacacttgttttctttcctttttttctttaatttctccccacctcttattacctctaaacttctttctgaatttatgttatttttttttcctgtttcagcaatgtacagggaggccactgaggccagttatctctcatttggtattttattatatgaaaagtgatttattgcagtagacagtgagcagccattaagcaagaactgggccttttaaaatttctttttagatatagatgcttaaattctttttaagcacttagtaatcgtttcagcctgaaggttattgcttagatttcaattttagagcaatgtactattgaaaagactgaagctttgaacctttccttgtccccaaagtttaaaatattctcagctgggcacagtggctcatgcctgcaatcccagcactttgggaggctgaggcaggtggattgcttaagcccaggagttcaagaccagcctgggaaacatggcaaaaccctgtctgtacaaaaaatactaaaattagccaggtgtggtggcatgtgcctgtagttccagctattctggaggttgaagtgggaggactgcttgagcctggaaggtcctggctgtggcaaaccgtgatcacgccactgcactacagcctgggtgacaaagtgagaccctgtctcaaaaaaaaaaaaaaaaaaaagtaaaaaaaaaaaaattctccgttgagtctttgttgactcccccgccccattaatgctgtgtttgaaaacctgtttttagtattttttgtcaagcatcttgaagagtagaaatcctatactgactctaattttatttctctaacctgtacagtgctcgagagttagcttgggatgaaatgaacttgtggtaaaaagcatactccaccactttctaacagtatgaactttggcctgttgttttaatctcttcaggcctcagtttccttacctgtaaaacagtacctacttcttagggttgttttaagggttaaatgagtacatataagtgcttagaacagtgcttggcacacataagaataggtgtcatataagcattagctattattaaaacaaatgtctttaaaagaagaatttggcccaaagtaaggagtacattattcaaaatactttatttaaggggtaaaaatgaatactactgaaacgtaatgtgaactaatcctacaatttccccaacacagtgacgtttgagtacctttgagataattctagctgttctgtagtaataggtactttgagaaccacttcaactgcaaatcaacaaatctattggaactaaaattcctttattataacctcttcatttttgagtttcatagtttgtggagactagttgatttgggcacagagtgaatttggatatgaattttctcagggctagatttgtgatgtagcagtaactgaagatgcagtgacagagtttaaagaggcagcagctagcaaacaaacaggatgcttgacccaggaggcatttcccagggcaggcctaggtgcagcctggcttggccagtgattgcagactagatttctaggccacagaaggctgtgggtgaaggccgctgtggtgttgagttggtgaccctctgtttctgtcaagcttttttgatgtggaccccagtgtctcaggaggtgcttagcttcagcccagcatggccaggaattataggctcgaccactaggtcccagaaggttcctttttgaaggcagtagactgtaggagttgaacccaggtttgcctcatgacaataggtaaactcttactaatcattccatactgttttcctagtgarggcagcagtggaaaaaggacagtakctgtagcagtgggggcatctatgtgttcaccatctaaacggatagatgatatgctatttgagtgggcagctgtaaagtcaaaggggctccctgcaggcaacaatgtcaagatgatgatactggaggagatggtagtggtttggtagttgttacaagcctttcatggatctattagagcttgggaatgcattttgggtatttttacctcaaatcataaactcatagtctttgcattatggaactttagaattgaaagggtgttccagttcccttttttgtggtgtgattccatttaagtgatcgtccaatgcatgctaagggatcaacaatagggaattacttcctcctttccaccaggatgtaagcttcatgtagacaggaattttgtctgtttgttcattgtttaataaaaattaaactaaaaggtgactggagcagtgcctggcacctaataggtacttagaatgaaagaatgcttggataacttggctaaagttttgtcttataaattgctcaacattactaatcatcagggagatacaaatcaaaaccacaaggtgatattatctcgccccagttagtatggctataatcaaaaagacaaaaaaatgctgatgagaatgcagagaaaaggaactcttatatactattggtaggaatgtacattagtacagccattatggaaaacagtgtggaggattctcaaaaaactaaaaatagaactaccatatgatccagcaattccattgtttggtatctagtcaaaggaaagggaatcagtatatggaagagatatctgccctcttatgtttattacagcactattcacaataacatggaatcaacctaagtgtctaccaacagataaagaaaatgtggtgtgtgtatgtgtatatatatatatatatatggtatatatatatatatatatatacacatatatacatatatatatatacacaatgaaatattattcatccataaaaaagaatgaaatcctgttctacatgttgtcactcatatatggaagctgaaaaagttgatctcataaaagtagacagtagaatagtggttactagaggctgagaaggatagaggagcagaggggataggagaggttggttaacaaatataaaattatagctagatagaaggaataagttctagtgttctacagcactgcatggtgactatagctaaaagtaatttattatatattttcaaatagctagaagagaggattgaatgttcccaaaacaaatggtaaatctttgaggtgatggatattaccctgcttttgatcattacacattgtacacatgtatcagaatatcactatgtaccttgcaaacatgtacaattattatgtgtcagttgaaaaataatgcaaaagctttattttatatattgaatatattatgtgccaagcattatctaaggcataccttacccctgtgaagtatatattattcccaatttatggatgagtaaattgacacttaggcattaagtgtatatatgaatctgtatctatgattcatttattttggtgctatctttataagggttttgatagtagcgtcttgccatctttgtgaaatgaatagcaagctcccatttttgtctatgctctggaataatttggagagcataggaattgtcagttcttaagggttaaaaaatcttacctataaaaccatttgatcttcatactttttaaagaggtagatatttaacaatattttattggtctattcatattttctattctttcttgagacagttggtaattatattttactgagaaacccactattttatctagatttaaaaaatatattggcacaaagttgacatattgttttcttttcttcttttttgtatctgtggttatatgctctttcttactctttatggtttttttttgagatcttttggggtcctaattctgtcattttacatattattagaaactttgttgagcatgctaacatttagcttgcatttattcatatatccacaaggcttgattaattaaattcaacaaacgtttattttttatgccagatagatgctaaagatacaaagggtgattaaaacagggtctactataagaaatatatagtacagtaaagatatttgagaccatttgtcaagtgttttgctgaaatccagatatgttatttctaatgtatcactcatccaacaaaaaaagtactttttaaaaataaattcaacttttattttagattcaagggatacacatgaagatagattgtgtgatgctgaggtttggggtatgattaatcctgtcacccaggtgctgagcatagtatctaataggtagtttttcagtctttgcccccttacttcctccccaggtagtcgctggtatttattgtttcaatctttatgtccatgtttacccaatgtttggctcccacttataaatgagaacatgtggtatttagttttcttttcctgcgttaatttggttaggataatgacctccagctgcatccatgttgttgcaaaggacatgatttcattcttcttcttctttttttttttttttttgagatggagtctcactctgtcgcccaggttggagtgcagtggcatgatcttggctcactgcaacctctgtctcctggatttaagcaattctctgcctcagcctcccaagtacctgggattacagacacgtgccaccacgcctggctaatttttgtatttttagtagagatggggtttcatcatcttggccaggttggtcttgaactcctgacctcttgatccacccacctcggtctcccaaagtgctgggattacaggcatgagccaccacacccggccatcattcatttttatggctgcctagtattatggcatttcatggggtatatgtaccacattttaaaattttattttacactaagtcatgggagacatgtgcagaaccttcaggtttgttacacaggtatacgtatgccatggtagtttgctgcacctctcaacctgtcatctaggttttaagcccttcatgcattaactatttgtcctgaagctctccctccccttccaccctccacaggccctggtgtgtgttgttcctctccctgtgtccatgtgttctcattgttcaactcccacttatgagtgaggggacatgtagtgtttggttttctgttcctgtgttcatttgctgaggatgatggcttcctgcttcatccatgtccctgcagaggacatgatctctcattcctttttatggctgcatagtattccatggtgtatgtgtaccacattttctttatccagcctatcattgatgggcatttgggttggctccatgtccttgctattataaatagtgctgtaataaatgtaagtgtgcatacgtttttataatagaatgatttctattcctttggttatatacccagtaatgggattgttgggtcaaatggtatttctggttctagattcttgaggaatcgccgcactgtcttccacagtggttgaactaatttacattcccaccaagagtgtaaaagcattcctatttccccacagccttgccagcatctattgtttcttgactttttaataatcgctattctgwctggcgtgagatggtatctcattgtggttttgatttgtatttctctaatgatcagtgacgttgagctttttttcatatgttgttggccacataaatgtcttcttttgagaagtgtctgttcatatcctttgcccactttttgatggggttgttttattcttgtaaatttgtttaagttccttgtagattctggatgttagatgtttgtcagatgggtagattgaaaaaattttctcccattctgtaggttgcctgttcactctgatgatagtttcttttgtggatgcaacatattttctttatccaatctaccactgatgagcacctaggttgattttgtctttgctattgtgaatagtgctgcgatgaacatacaagtgggtgtgtctttttggtagaacaatttattttccaaaaagtattttccgagaaagaggcaaaaggggttaatacacaggatctgtgtttttttttaattttctgaacctatatttgggcctaaacattacctatttaccttgtacatgctcagttatgcattttagcatcttgtcctggtaattgaatttatataaagaatatattactagaacatatcttgctcattaatagagtcttttggaaagatttttaaaggacattttaaccattctagaaatttataaattttatcaaccagagaagtgcttcttatattttagtagggatgcaaatcacctggggatcttaattaaaatgtggattcagattccataggtttgtggtagggcataggaatcaatgacccaggtaatgtctttactgcttttcatcagtgctgctggctgtaaccacaccttaagtagctaagagttacaggacagaaggataatatatattctgttttataattagtaaagttacaggtctataaagttaacaaatagagcatttaggctaaaattaaaaagactgacaatgccttgcgtgttggtgagggtaaataataactggaactctcatacactgggagtgtaaattgttataactaattttgaaaactatctggcagtatttactaaagttaaacatgtgcctgttctgtgaccagaaattataattccaggtatatacccaagagaaatgagtgtatttgtccactaaaagacatacaccgcttgttcgtagcaattttgtttgtaatagccacaaactgtaaacaacccgtatgtccacaacaggagagtacattaattgtggtatacttactcggtggaagactattcagcaataaaaacctgatatttgtaataacgtagatgattttcacagacattatatggagcatagagaagtaaagagagaaacagctaaagattagaggaaggtagaaggtagagtatgtactgtgatttcatttattaagttcaggcataactactttacaatgatagaagtcagaatagtggttatctttggttgggtaattaattgggaagaggaatgtgagaaccttctggggtactggggatgttttatagcttggtctgggtggtgattatatgggagaatacgtatataaaaactcatcaagtaccttgatggactgaatttaggattaktgcatttcactgtttttatattctatatattaataaaattttaattaataaaataagtagagcatttaaaagaagagaaaaatatcttttgaattctaaaaaggctatgtatacatttttattgtggaattgatttctaagagtgttgctatgtgttcatgttcatatgcatttactgagtgaaagtattaaaaagcatatgtaaatgtggtgaattaatgtagctagctgatttctgaaactaactagtgtggttgtcattggattttgggataatagaatcacagctcagacaaactttggttaaattagaatatttccatattttgtttcagaggagagctgaaaattccaaggaaacaagcttttttcagctattttggaaatcaaaacaaaaaacattaaatgaaagtcttcttagtcttcaaactttccctttcaattggtagtttcctgtcctctgttctggtgccttgctactcatgctgtaattcctcactgcttaggatctctcattgtgttttattcaggacacaatcttgaatcttatttgtctttatcttcatatctctaatatttctctgcactcctctttcttttcaggagtcatagaattctgtagctttcaaactttgtattttaagcagaggaactaatttttaaagcaaattttgaaaaaggaaatctaacaaaattaaacactttgaaggaactgtgacagttccttcagcactctcagcttactccttcctctttgccttacagcaacttgacagtgggataaactttgggggaaaaacaatctaacacaatctagcccaatcttttcactttataaaggaggaagctgaagtgtagagaaggcttcatggccagtaatagtcagcaacttcaggctatcataaaattagtttcaattgctaagtagtaaagttcaaagatggaaaaaatacgattaaaaaaactctacatgcaatttgaatgattaatatagtgattctgaaatcttcttttcaaattatgctcatagacaagtaaccataattcaaaatttccagttacaagtaaatcacttcttaaaaacagtaatgctattttcgacaagggtgccaagcaagacaattcaatgggaaaataatagtcttttcaaaaaatggtgccaagacaactaggtatccccatgcaaaagaataaagttggacccttcctcacaccatataaaaaattaacccaacatgaattaaagacctacatatgagagataaaactataaaacttatggaagaaaacataggaatacattttcatcatcttggataggcaatagtttcttagatatgacatcaaaggcacaaatgaaaagagaaaagatgaattggacatcaaaatgtaaaactttgtgtctcaaaggaaaccatcaagaaagttaaaagacaacccatggagtgggagaaaatatttgcaagtcataattctaataaaagacttgaattcagaatatattaagaactattacaactcaacaataaaagacaaatacccaaattttaaaaaagcaaaggatttgaatcagtatttctccaaatacgatttacaaatggacaataagcacaaaaaatatatgacatcattagacattaaggaaatataaatcaaaatcacaatgagtaactacttcacacatactagggaggctatagtaagcaaacaaacccagaaactaaaaaatgttggcaaaggtggaacattcattggaaattggaaccctcatatattgctcatgagaatataaaatggtgcagccactttagaaaccagtatcagtttctcaaaaagtaaaacacagcgttactatatgtatagcacaacaatttcactcctactagctgagatacgactctctctgaaataggacataggacaaagaaggctttgatagaaagaaggaaaatgaagaaagatatattttaatatggtgaaaagcaatacatacttaaattatttttataaagcataatgaagttaagtatttctctagccatgccctttttgcttaactaatttaataaatgaaataatgtacatttgtgtgtgtacatttgaacatggaatttgcatgttgtgaggttccatttttaaaactatgaattagtaaaaataaattaccgactccttcaattcctttcttcctttaactttctgaagttaattttcattcgttatttatattttgatcagcacgggagttctgacctgctccatttccaacctgggccggtttaccgttccttaggaaacctgttggtctcccgctcccagcaggtcaccatattgatgtcgaacttaatgcagaaacctattggcatatcacactacagtccagaacttctgggctcaagtgatcctcccatgtcagcctcctgaatagctgtgactacacgcacatgccaccatgcgcagttatttatattttgaaaacttttctctttggtttttaaacatagctatctgatctgtaatatctgtaatatcatatagggtctattaaatgaggataaagacctttcacataggagtgttgtaaggagacgtgaactatatttattctaaatctgaaaaactccaagtcttcatattatagttcctttaaaatcccttataactttatttctcagcttagtatattttctcagaaggcatgttaaaaaaaggataatgttttaatccaaaggaatgaatctctaaaagaataatgttaaacatcattttatgatattacagaagatatatcttattacaatgacaacattattttatgatattacagaagatatatcttattactatgacaacatgtgtttttgaggtagtgggattttatatcatgtgggctattgcttatttggtctatgagtgagtgtgtttccagtctttaacttttaaaactgagtgtgtgtgtagttgtggttttcaaagacctttccatatacattatttcacttacattcacagtaactctgaggtagatttgtgttttattttttgaaattgaaatgtaaacatataaggtatttaaaatatggatgtatatatgtgtaactaatagttatgtgaatcctatgtaaccaaccaacattgaggtaaaaaaaatgaaatcactgttattttcccagaagccacttgttttccttcccaattacacccccatactccctgttggtatttagtgttaccccatcaccattctgtgtttaatgttagtcactttctttactttatagttttactgcctatgaatgcatctctaaacaatatagttcgattttgcccgtttttatgcattatataaatggaatcatgcagaatctattttttgtgtatgttccaatttttgtcaaactgtatcattatcatgaagacctacttcattgatttgatttttattgtgtgaatatcagaattgtttatcctctttatttttactgggcatttggactatttccagttgctggttattatgaacaatgctgctataaacctttttttgcatatattcattcttagtggccatgtgtacaagtttctgtaggctatatatgcaggaatggaattgttgagtcagacaatatgcctatcttcatcttttctagataatgtgaaactcttttcaaaaagtgtttatttatagtgttaccaacagcctattaacattcttgttattcagcattgttgctaacaattgatgttgtcagacttttaatttctgccagtctgctgagtattaaatgttgtcttaccatggtttaaatttgcattcctaattactagtgatattaagcacttttttaataagctattgattaggtagatttcttcttttgtaatgtgcttgttcaagtcttttgcccatttttctattgggtcattgccttttttttttttattttttgagacagagtctcactctgtcacccaggatggagtgcagtggtgtgatctcggctcactgcaacctctgcctcctgggttcaagcgattctcttgcctcagcctcctgagtggctgagattacaggcgtgtgccaccatgcccagctaatttttgtatttttagtagagatgaggtttcaccatgttgctaggttggtctcaaactcctgaccttgtgatccacctgccttagcctcccaaagtgctgggattacaggatctttttttwaaaaaaatgatttgtagttttctacaaatctgtatataaattctatacaattctgtatatgaactgttgtttacatgtattgcagatatcttcttccattttggcttgtcttttcactttatggaatcttttgatgaacagatgttctcatttttaatattgttgwatagttattgatcttttcttttttggttaatgcttttcctgtgctgtttaggaaattatttcctatctgaggtcataaagataatctccagtgactttcaattgaccttgaatacacctgaagatgttttggtatactgtctaaagtagaggtgtagtttctttttttcctcttatggatgtccagctatcccagataatttattaaaatctcttttcttgactgctctacagggttacctttgtcttatgtcaaatgcctatataaacatgggtttctttgggggttctttattacgttcttttgatgtgtttgtcaatccttgcacccatacaaccctgacttaattatatttactttataataagttttgttattttgtagaatargtcctgccaccttattcttatttttcaagtgtcttgatacttcttggccctttgcatttccatataaatttagaattaacttgttgagttccacacacatgaaaaaacctattgggattttcaatttagtttgcatttaatctattagtaaaattttatggaaatgatactttgataacatagaatctttcaatatattaacatattttctctctccagttattttagtcttctttaacatctcccaataaagcttataatttttcttatacaacatgaacattaagcaaatttaacagttcaaggcagtagtaacagagaagtcaaaaagttatttgataagtgaacaatacaaacaatagcttaaggattcagaagaggaacaaacatgctttagtgtttcataacaggtaacactaaaagacatttggtcaaatattaattaagtagtaatatctttgtgccctcatagtgttacacaagtctggaaattgtcatattttcaattggttaataggttaaaaataaattaatgtattggttgttttattaactatctgcacagccactattttagtttcgttttttccccactattgatagattattttccccctgaaatggttagctttaagcagatagtttggtaacacatatatatatatcctgcatagtaatttccaactcaaatatgttataaaagtctttgaaacataaatatttgatgtgacttctgaaataatgaaataatgcatgaattggctcttagtagtaagtttagccatttccatttggcctattctttttaaacatcaaaggccttcttaagtgcataacatatgggctccaggggaaaactgagtcatgtgcattgttttacattaaaatataatttattctgtcattatcattgtgaaaatagagattggcacatttaaatgaagctggccttcttaattcctaacaaaaataaatctctgttggtagtgagggatactgtacacataggtcccaaccttgtcacttctgaggaacagtggtgaaattgtttgttcctgacagcagacagccccattgcagagctctggtttcatgttacattaagtattagtgctgttctttcaggagctattatattgtgacatcaaagatttcctgacagggcagtggtaggttagcactgaagttgtctactgaaattttaaagaatggaattaaatatatatatgatcagacttttatataaaaggtagagacagaataagagtggtttaaagaaagttgcagaaatcattagtttatgggctatctgctttatctctgcttgtttaagccaaattctattaccttttatttcttcaacaagtacaaatggccattatgttaatgctagggtagttgataatttccagaaagacattatgaataaggaaaaaatagccttttgtgaaataaaaatggttaggttgacatgtagagtatttgatataaatgaacatgtggacagtaattgcaatggcctgacttcctgtttgcagatccactaattagttaaaaggatcaaactacatactctattataaagtttcaggagtacaacttagatggcaagtgaagagatgagaagtcttgcaactgaaaaggcttaattttacattgtagtagtataaatacagctgactttaacattaatcaaattacagtgttgtcttttgaaaagactaacttttgttaagtgttgggaaatattagtcatttttgtctgtataggttttctgtttaaaaaataaattaagcattatggcttaaagtatttcttaaagtttttttgaagtgcaatcagttgctgtaactacaacattactatgacatattcatgaaaatcttgggattataaaatgtcagttaattttagaagcacaattcaatgtccggacatttaagacaatataattataatagttttgtttgagattaagtaaataaataatatgttaaaatgcatatcttctcagtattttagttttccttttgctacagtaatagtaaatacaattttttttgattataagcaaagtataccatgacacatttattttaaacaatataatactgacactgtaagttcagaagtaactggaacaaagaagaaacatttataggtattcgtgcgtttgattatgtttcaaaataattttcatccagatcaaagtaatccataatatattcatgaaaacagttgtttaaaaaaactgaatgtcggactgggaacagtggctcacgcctgtaatcccagcactttgggaggccaaagtgggtgggtcacttgaggtcaggagtttgagaccagcctggccaacatggcgaaaccctgtctctagtaaaaatacaaaaaattagccagacgtggcagartgctcctgtaatcccagttactagggaggctgaggcaggagaattgcttgaacccgggaggcagagattgcagtgaggcgagatcgcactactgcactccagcctgggtgacagagcaagactctgtctcaaaaaaacaaacaaccacaataacaaaaccccccaaacaaacaaacaaacaaacaaacaaaaactgaatgtagaggctgggtacagtgttgcatgcttgtagtttcaactgctaaggagactgaggtgggaagattgcttgagcccaggagttccaggtcgtagtatgctgtgatcgcacatgtaaatagccactgcactctagcctgggcaacatagtgagatgctgtctctaaaaaacagaaataaacaaacaaaaaactgaacataaaggtctttgctgtggcatgtatctgacagttattcatacagattaaattgcataggggggtaatattgctatatcctttaaatcattaagaacggttactctaaaataaaatgcctayggagctctgctgtattcctcttgccacttgttgaaagtgagatatttcaacttgtagttctgaagtggattcaaatatataaaaatgctttcacctttgaaaatttttgttttgtttttatttttggcatgacaaaatacattggcaacaattcagtagaagcaacagcccaagtatgaaaaatattctaatatcttctctgaggaccctgaagtcttacattctagaagtgttcaagtagattaaatatttttcctttaaaaatgttataattttaaagtacagtatttggtatgaaaaaggggagaatattaggatagatgtttactcatttaaaatttaaaagcaataatcctgtaaaaatatttatattaccaatattgtttcaatccttttacttctgccagctacagaaatcctaattcaaaatgctttaaattgtcaatctacaaacagggtacatatagtttagtaattagctggctaaaagcaacacaggtatatttgaaagtttctagtatgtgtatttattaactgaaggactgagagactaaagaatgttgatctttttcatatgatgaaggaaggtatcagtactttaactaatttgaacagttttgaaaaccatttaaagtctagttagctacactgtatatgaaacaattgatcaatagtgctcccaagagagctaattatagatgcagtcaacccttcacaagaagctggtaaatgaatgttagagaaaaagtgtgtgtttatttatgtttgaaaattttgtgcatytaaataaaaggcttctgggaaatacgttcccagagaatgtaaggagaattagttggacatttaaaatacatagttttctttttaaatacaagttttttttttcattgaaaaacctaagcaagtagacrttgctaccaaatttacctgtattaagtttaaatatgttaatgcttttcccagtcaacaaatatttattagctgctgactgtatgtcaggtctcatggggatagaaaataattaccatgcatctctgagctcaatgaatttaatagttgttaggacaaaaccagagagtatacgatcaattgctagaatatgtggtaagactgtaccttcaagatgagaaagaataaattcagtcataggaatcagagtaggttttagtaagtaaacttttccattgacacttaaggcactatgggatttagatgggcattgctgaagggtgagyatctcaaaatgagtgagttttgtctttgctatgtttgcaaatttatatcatctgggcacttttctttgggcttatattaactggttataattatgaaggaaatgcatttagaatttttccccactaaaaatacaaaagcctagttttctgcacagtatatctttttttttttttttttgagacggagtcttgatcagtcacccaggctggagtgcagtggcgctatctcagctcactgcaagccccacctcccgggttcacaccattctcttgcctcagcctcccgagtagctgggactacaggtgcccgccaccacgcccggctaatttttttgtatttttagtagagatggggtttcaccatgttagccaggatggtctcgaacttctgacctcaggtgatcattttaatagtctcatttatgcaaggtggtacattgctatatccaagaaacaaaatgtatsacttacatatttttctgatttttggtgaaactattcagttaaagggatggtcttcttataatttttgataattcttatatttaaaataatttctcacacacatactgctgtatacgtactgtgtgctaactgattgtaccactggagcacccaaaataatttctgttaacacataattagatggacattaaacaagataattttgtggttgatatttraatttctttgccttttaaatgggcaccagtgaatagagtgagctctgactgttttgttgcactggcattttgttttatttaattttgatataatccctaactttcaaaaaagtgctgagatgcatttatttaaaaatttaaatgattgaaattaattttaatttcagaatttttaaaagaattttgcaaaagcctttaaaaattgcagtggggttggcatgctaaaaaatcaaagacctgggattggaatttattggtgtaaaaattccaactcaagatgcgaaagataatttgataatgctcttcaacctctatgatgcttacatgctgatccaccttgcatttattaatttgttttttctttcattcagttaacacatttatttagcatagacattgtgctaggcaccaaagatagaaggatgaaaagtaaaaggttactgccctgggtaaaatcacaattgcgggatgggagagagaaggttaagaaggaagaaaggtagaagtgaaagatgcatttgggagagtaagggtggacagtgtaaaaggcatcaaaatgtttccatattctataatgttatgaatatttttatggagtaatgaataaagggctgttggagcacataaaaggaaatattaattttgactgagttaagggttctcagatactttttaaatgcatataatgtgaattttttattgcttacttcattgccctaaggtcaggtcaatatgttcttattttcacatttttaaaattattgaggtaaaatttatattacattaaattattcattttaaaatgaacatgtcagtggcatttagtacattcacagtgttatgcaaccatcacacctatcttgttccaaaacattttcatcacctgaaatgaaaactccatacctactaagcagttaatcctcattcctcccttctccccaaatctgctttctgtctctgttgatttattctattcttcatgttttctataaatgcaatcatacaatatataaccttttgtgtctggctgtttttcacttagtgtaatgttttctaaatttatgtattaatattttatagcacatcactacagatcgagtatcccttatctgaaatgcttaggaccagaagtgttttgaattttggatttttttttattttggaatatttgcatatacataatgagatatcttggggatgggacccaagcctatacaagaaatttacttatgtcttgtatatatcttatacacatagcctgaaggtaattttttacactattttaaataattttgtgcatggaacaaaatctgtgtacataaaccatcagaaagcgaaagtgtcactatcttagccatccatgtggacagtctgtggttgtttggcatcactgtcattcctgactctgaatttatgtggtatcattaagcaatcattttcttatacttattcacacataagttcttaacagtaaaaaaaaaaaaaatatggccaggtgcagtggctcacacctgtaatcccagcactgtgggaggctgaggtgggtggatcacgaggtcaggagttggagacaagcctgaccaacatgttgaaaccccgtttttattaaaaatccaaaaaaaaaaaaaaatcagccaggcgtggtggcatgcacctgtaatcccagctactcaggaggctgaggcaggagaattgcttgaacccagaaggcggaggttgcagtgagcagagatcgccactgcactccagcctgggcgacagagcgagactccgtctcaaaaaaaaaaaaaaaaaaaaaaaaagaaaaaaatatgacataccattaatacagagaaacaatgtatttagggtaactaagcagcacagtagcgtcactataatacctgtgtcagttgttaaacaacaatggccaccaaccgtggcagtctccacctatgttgtgttttgattgaaaggttactgtatactgtattttatttttttaggtgagaagaaacagttgaaggactaggaagaggatcctctagggatgagctggttggcttttaaaaatatttccttcacggtcatctgcctcgttaacaatggtttttgtcttagaagtctctctttgattttataaacagagatgatttcttattctgttatgaatgtgtgctgctcttgtacttcaataagcccaccacacattttcactctgccatctataggtattttttttctgtagagttaacatgacttgtcagatgaggtcaggtgtggaattttctacttatagtgccaagttggcactcaagaagtttcagattttggagcattttggatttcagatttttggattagggatgtcccatctgcacttcattcctttttattactgaataatattccatgatatgtaccacagtttggttatccattcatctattgatggacatttaggttgtttccactttttggctattgtgaatagtgctcctatgaacatttgtgtgtaagttttgtttgaacacctattttctgttcttttgcatatatacctaggagtggaattgggtcatatgaaagtcccgtgtttaattttggagaaagtgccaaactgttttccacagtagctgcatcattttacctttccatgagccatgtatgaaggttccaatttctctacattcttgcaaacacttattttccattaaaaaacattatagccgccctagcgggtatgtcagatactattttgatgcctatttcttgacggtaaagagctggggatctctgaaaaccatagggcaataatgctttggctgagtttctgatagatgagatacaataggcttagctgactcaacctatttcttttcccttagcaggaattatcctgagtttaccagagatacctcttggctgaccaaatttcaatactacatggtattgtttattgcccagaatctcctgtcacaagggcaggattctaactcccccaggacttatgaaagttaaatatttcaaagtttggtagcattgtttttgtatcttcactggacttactttgaagatgagcctaaagagattttgctcacatttcagaaggttcatgaagacttctgctgtagcactttaggtgaccattagtaaacttaggagctagtggcctaaatcagaggttctcaaactttttattcccaggatctcgttgcattctttaaaattatttggaacccccaaagcttttgcttatgtggtctatttctttttttttttttttttgagacggagtctcgctctgtcacctaggctggagtgcagtggcccgatctcggctcactgcargctccacctcctgggttcacgccattctcctgcctcagcctctcgagtagctgggactacaggcgcccgtcaccacgcctgactaattttttgtatttttagtagagacggggtttcaccatgttagccaggatggtctcgatctcctgacctcatgatctgcccaccttggcctcccaaagtgctgggattacaggtgtgagccactgcgcccggcctatgtggtctatttcaattgatatttactgcattggaatttctttctgttgacgagttttttactttaaaattatttttgtctgtcaagaagagagtgtgttatggggttactgtggatacttgtttgtgggttcttttaaaaaaagaattcatgaggagttttggtctgaagctttgttttttttttgtatcatatttgtttcagtatggttttgttatcaggttaatactagcttcgtaaaacaaattgggtagtgtttccttctcttctgttttctggaagagattgcgtagaattggtgttaatctttaaacatttggtagacatttgggcctggggatttctttttgggggtacttaaacataagaattcaattttcttaagagttatagggctattcaaattaactatgtcatttcatattgagtgaattgtagtaatttctgttttttgagmaagtggtccatttcatctaaattgtcaaatttatgtgtgtagagttactgctagtattcacttactatcctttttatgtctgcacggtctgtaatgatwtcccctatttcattactaatattggtaatttgtgttttctctcattctttgtcagtcttgataggggcttgccaatattattgatcatttcaaagaaccaattttttgttttgtttacttttctattgttttcctgttttcaattttattggtttccgctctttatcattttcttccttctgcttgctttgggttaattttgctctcttgtttttctgggttcttgagatgggagtttagattattgatttaagatttttcttcttttcttatgcatgcatttagtgttataaatgtctttctcagcactgctttagccatgcctcagaaattttgatatattttcattttcacttagtttagtgtttctttttttaaaaaaatttcttttgaaaattttttttgactcatggattatttggaagtgtgttgcttagtttccaaggatttggagatagttctttctttcttactgatttccagtttaatcccattgtggtcagagaacatgctctgtatgatttcagtttttaaaaatttgttgagttttgttttatggcctagtttgttgtctatcttggtatatgttctaggggcacataaaagatgtgtattctgtcattgaatggagtattctatgaatgttgattagattctgttgatcagattgtttaattcttctgtatcatttctgtctgtccagttctatcaatctttgactactggaatagtcagtttaccagtttgcatcaagtgtaagaaccttacctccctttatatccaattactttaccctgtttataatgtaattggcttacctgttttctctacatacatttagaaccacattaggcaatgtgcattaaccatcaaacataatttagaaaattcaggaggagaaggaaatcctattgtatttattcacactattatattttgcctctcttattctttcttccttcctgatgtttcaacatttcttttattttgtcctttctgtttagagaacttcctttagtcattttttttagagtgggtctgctggtgataaactctcttcattttccttcatttgagaatgttttgatttcccctgcatccctaagggatattttcattgggtataggattttgggttgactagtcatttctttcagcacttcgaaaatattgtgccacttctttctggcttctatggtttctgatgagaaatctgcgtcatttgaattattttccccttataggtaaggtgtcatttttctttggatgcttttaagatttttttgtttttagttttcagaagtttaatatgatgtatctttgcatgaatttctttgaatttatcctgcttgggatttgctcaactgtaggtttatgtatgtatgtgactataattaggatgttttcaattattattcctttgagtacattttcagtgtcactgtctttcttctgtcctccaggactctgaggacatgaatattagatattttgctatatcctcaaagtttcctgacattcggttcattttcttgaagtctgttttctctctgttatttagattggatatattctattgttctgtcttctggttcactgatttggtgctttccattctacaattgagcccttctattgagcttctatttttgtttgtttgtttgtttgttttaaatagtgacagggtctcactctttcatccaggctggagtgcagtggtatgatcatagcacactgcagcataaaactcccaggcttaagttatccttctgtctcagcctcttgagtagctagaactaaacgcatgcaccaacccgaaccagctattttaaaaaatttactattgagcttttaattttagttattgtagttttcagtttttttttcatttggttcttctttatgttttctacttctctgctgaggctatttccttcatttgtttcaaatgggttcataattgctcatttatatattttttatcatggctgctttaaaatgtttgtcagattattctaacatcttggtgttggcatctattggttatctttttcatttaatttgagatcttttgtggtatgacagtgatttttgcttgaaatccatatatttttgttttttattatgacactctggttcttttgtaaacttgttttagctagctttccttaacactggttcagtaagggaagggaggctgctaccttgttactgctagatggatatggaagttcagatggtcctctgggtggtggggcttcttgtagtgctggatggggagttctagctccccatgtggtcttcactgacatcttagcagaggtggcctcattactgttggtcaatgatgaaagttttgactctccactaggcattccttgataccattctgcgggagaagtgggagggtcactggggccagggacaggtgcaggtatggggatgctactggctggtgggggtaaaagtcccagatgactacctggttttctttgacatttccgggggtgggtattgggtacctcattaaagccgtgagagagtggaattctaggttcaccactaggtttgagtgggtcagggtggagccatagtattttttctccagtgtttatctggagttagaaaagatagtgtctaaaagtttcctgtcttactaaaagctgcctctttcctggtccttgggatagagagagcaaacttttttgggggactttttttctgtatctattgatgtttttaggttgctggcttctttagctccaagtctggtatacacaacgcgaaaagaaaacctaggaaattcaccagtgtcattccttggttctgagtttcctagccagcctgtcttctttccactttttagagtcctcttatgtttgtcttatatacagtgtccagggtttttagttgtgttttggggaaggaatggggaaaagtacttctgccccatcttcccggaattggaagtcttcatattagaaattttaaaaacacaagaacatgttagacttcagaggaatcacattattatataacctctggaaaactccactgtatacttgtgagaattagagtgaaaaaggcaaataaggggctgggcaccatgtttcacacctgtaatccttatactttgggagaccaaggcgggtggatagtttgaggtcaggagttagagacctgcctgggcaacatagcaagtttctgtctctatgaaaaaaaaaaattagccaggtgtggtgatgtgtacatgtagtcctagctcctagggaggctgaggtggaggttcttttgagcccaggagtttgagattacactgagctatgatcgcrccactgcactccaatctgggtgacagagtgagagaycatctattaaagaaaagtaaataacattattatccttattgtgaaaaaattagacccctgaaagagtcttggtaacccctggaggtttcatgaccatacattgaaaactcctrccataaactataatctgtccagggacttgaaaatattaatgttgacaatatcagttttagaacaatttttgttaaatacctattgttctagtcaggcactgatctaagtcaggggatataaccatgtatgagatagagaaagtccctgccctcatgacctttgaattctttgggtcaagtaatttggcaactgaatgaagtcatgagtcttctgttkggctaaactaaatacttacattcatatcttaggaggtgtctgggtttgtgrgtgtgtgtatgtttatttacagtaggtgaagcagtatagctgtggtcattcacaggagcagttcaggctactgagcccactgtggtgcccagaggcagtggatctaccctccatcaggagggtagataggaatacttagttgtagtacagacaacatgattctgtacatgatttctcctcccttcctgtcttattccctttcttattcctcccctttatttctgccgttctttcttccttctttttcttttaatatttcaatagttttttgggaacaggtggttttggttacatggataagttctttagtagtgatttctgagattttggtgcacccatcacccaagtagtataccctgtatccaatgtgtagtcctttattcctcacccgactcccatatttcccccaagccccaaagaccattatatcattgttatgcctttgcatcctcatagcttaccacaccttaaaagtgagaacatatgatatttggttttccatttctgagttacttcacttttataaatacaatggaatactactcagccataaaaagaaatgaaataatggcacttcttccttctttcttaccttccttccttccagtttgtgttgtaggtagattgtttcctcagattgagtttacaattcatactgtcctttcatcctggcaaagttgtagccccacacttcattattcattttatttatgtatacattttcgtataaacatatatgtacgtataaacatatatgtacgtataaacatatatgtrcgtataaacatatatgtacgtataaacatatatgtacgtataaacatatatgtacgtataaacatatatgtacgtataaacatatatgtacgtataaacatatatgtacgtataaacatatgtacgtatatatgtatatatttacatatttatatgtaatacaaggcacctgctacattttaggcataatgctaggcactagaataacactgtcaattacacgtgaagccctttagtcttagagtaagagttagaatattttagtgtcatggtttgtagaggtcattaaggcatgcactatagagcttgcaggtccctcaccattctagcttccaattttaactggggttaacagttccttgtgtgcatccaccataacacttaggaatgcattggctttgaaaacatttcctccctttctttcattcccagcatttaactcataagaattggacttgacttgcattttcttgagccattgctcttaagggcagtctgacattaggcatcaaaatgtgctaactatggttgtagtctgacacccttttttttcttggccctcccccaaaatggcaaaataaaataaccaaaaatttcaaacatttggtttaattaaaataggccttgtagaaatgcatttgaatatttgaatagtgcattaatatgctaggaaaatcaggggttcaaaagtgaatattgccgcattccttaggccctgaggaatagcaacaaataaatattgtgcaaattacggttttggaaagactggtacaatacaattaataaggcatgaaaaccagtagcaagaaaatgagaggaaggggtaaagtcatttctttattttaaaggtagaaatgtgcatttttgtgtttgggttttgccattttaagacacctgtgtctcacttgctacaatcacaaattccaagggtgaataatggaaatcattgtataggtgtaaatggtgtattgagtacttttttcagtctataacacacctatcttgttggcaccaaagagcaatgaatgaggcattttattaaaacctaggcttgtggttccaatcaaaggtcactggttggttcccacttttcagtttcagatttgtctgtgtttgatcagggggcagcaacgagatttttatggcaaagactttgtactagcctgtatctgtctgttgaaacttgaaagtctttagaactgtgatgctgacagtatgtgaacactgcaagaaagtgtgaactgtgtaatgtcttaaagaaactttcaagtatcatcttccttttgtgatgtttgaaagagtttcagataccattatgatactagtgaaaaggtattttattgattaaaggagattttttttcctagcaaatatacattaagtcagtcttcctattactttttctgttctctccctgcttcatacagcaagttcattaacatgtagatatgcagtgattgaagtcagactgctttttacagtggagttgtcttgatataatgagctcctctttaatgttgaaaaaattgttgttactttctaaaaagggttgtttgtgaatttcattaatcttcaaacaatttctgcattgttcagtttactacaattaaaatgctttccgatgctaaaaaatcactttttacagatgtattgcaaatgtaagcactgtgagagtggctttgttttttactttgaaagaaaaagctgctatttagttgagaattcttatttttttaaattggccctccatatggaaaatcagaggagagtacacttactgtactgctgaacaggtgagtttgctcataagggttaggtttcacaactagttcattcaatccttggactagagcattggtctaatcatagttgaaaaatgagggccttaaccttgccttctcagtttactagagtacaactccttcgtatttagaatgttggaagtcttgagaaagaagagatattagtgaaattaagtttctgctttgggtaaaagttctcaaagggatgtatgatacacctgactaaattcttggttgcagagcagtgattgtagttcatagtgaatagcttcgttctttgtaaattaccttttccacttaggccctggtcagcaggacttgaatggtatgagagtaattcttggcatctcttgaagactgggcacagaaagaggcagaatgtctttctggagaatatttagcagattgaaggcttaaaaatttccaggtgatgtcaaggaagttttccaggtaaatcccaggacagttggtttatgaaggcagggagttggagagttgagaataaattacttgaatatcttaaagtttttgccagcaatcagagtttatagagctatcctagtcctactatgaccactattcaggaaaatgttcttccaagatatctcttcctgctttagtttcagagaccatttacatgatgctagaacatctagttaagttagagatacactcaaaagttcttgatagttggaaaagttgtagagaaaaaatattttagatgtttggctaatttttcaaattgtgttttgacttcttaaggacagagccagcatctgaaacttaacagcgttctttagtaaaattgagctaatcatatgattaagttggcctttataagccattatgttgtagctatgtaacaaaagggcttatcaaatgttttaatcatcccaaatataaggtgatactttgatctgaaaaaggaacaattcttgtgctgccttacacacaaaatacttctatagacttgtaggagctaataatggtgataagaatgttactgatattatcatttacaataataataaagaataacaatgttgctaatattataatttataattataaagttaacagttgcaggtgagaaatatggatatttgaaatagatacctaagaatattctatataagcaaagaagtaattacagaatggtaaacaaaagagtcatggaattttatgtttagattaactctcattggagattaccagcactatgttaattaagtcagaagaaactttacaaaagaaaggtaaattgataagctgggactatcyggggaggacatttcagaggatggtgtatagtccagaagaaagttgaatgtgggaatgagtttactggatccatttaatgtggagtacattttctagaggggagtttagggtgtgagatagggagaagaaagagctaggaacaaattggagaagagtaagcatttcagaaatttgtaaaatgcaatacagatgccatatggaaaagttcctaaccttactttgtccatctttacacttcatgtgaacatatatgcataaactttaattatactcaagaggcttttgacatgtttgataacattttccagtatttaagtgaagttagggtggagagatgaaattttatgagaaactatagttgtatttactaattgtgatcaaagtatttaataagactaaagggaaacaccacattttgaaaataccatcagaagtcttgggcttctgaagcttggaagacatttaactgacattgaaaaaggaaacctatgtgtggcaatgaagttatggtatgtaagaataaagaaaaggtggattataaagtcagaaatttctgaagctacttaacttgatctcagaggtattatcagctaagacctatgaattgggctataaatcgttacgttattggtctacagaataaaatttgtgccttccgtattttatgaattaacttttcatgctctttattagatgcaaaagcaatagaacaaagtgcaagaacaataatgtttaaatattagcagcaatttgaatgaaagtaaatttatgattataaaatgttatttgatgaaagtgaagccatactacatggcttgatgctgggtatttcatcaatctgaaatgttaaacattttaatgaacatagaaaatgttaagggtatttttcttaaattaaaaactaatgttttaatgctcacttctgcatgtgattctgtggttatatttgaactatttctataaagaggatgccacagttatcttttaattgtatttgaatatttgggccaagggacgaagttgaagcacttttattttagtgggaggaagtgtggaaaatgtgatgttttctgagataaaaatgagttagattagcattgctggtagttttatgaacatataataatttagtacagctttaggccatatttccatttattttattcagattttactgagagtgttgtttgtttggggatgtagaatatcagcactttcgatttgctttatttctcatttgtaggctatggctgtaatgaatttctaataattatgactgagtaatatctccagccgttctggcaacttgaatgtgttactggatagtctgtttctagtgatgattgtttatttatttaaggactttttttagatgcttgagatgtgagttactctagaatataattaagagctatggtattcttttgtgtaagtcctcatttttaattaaacagacttttgttttccttttatataaaaataaaaatataaaaaacccagaagtggtatgtcagtttttccaatcaagatgtcaagatcagaatcttgaggagaaatatttatatgaaaagaattatctggatatagacttaacaaaatatattattggattattggattattggtaaatatgaatttgttcatatttatgtaactagtcaagggcacatatggtggaaggcacttctgcttattaatatattcattatatctctatttcttttgcagtgatttaactttggtggatggaattctctgataaaaatgtttatgtgtccaagactttatatgtattccttctaattgtatttttgtattcaatagtatagcagggaaattatagttacaaataatttattgtatatttcgaaatagcaagaagagaagatttgtaatgttcacagcacaaagaaaagataaatgtttgaagtaccctgatgtgatcattacacattgtatacaggtatcaaaatatcacatgtacccccaaaatatacacaattattatacattaataaaaatttaaagacattatatgtaataataatgataatatattttatttaagaaacacttaaataccgataacacctgagcaaaaataattttaagaaagaaataattgtagttatgttgttagatgttcagctaattagtggtaatttagattcactaattatacacactgaatgatttagtaagttttcatagcattgtcatgttttttatgtataagttaaaaattcttttttattccatattgttgaattttttaagtgtcattgaggccacagattctgtttgtttgtttatttatttttggctgtgaattttgcaaattgtcctgctggctagtatgtkattgagattgagwtgttttccatttttagatatttctatgtgaaacatttagagaagtagtcttgtacatcttttaagtagtcaatgaccttatcttttgccaaaatcaaatgacattcaatactgatactatggagagaggaatcaaaataggtacctaattataattactttttcccctgtcattatatcactacatgcaaaacaaytgatttgtaagagatcacacaattgctgacttttggcaggtacaaaggttttttttctttgctcgtctctctctttcccctttcctgttttcatcacatgtaagatttattggaacagttcagactgacctccttctcgaaagatttaattttaattctaatagtttataagaaatagcagaaggacaaaaggaacttaatatgtttatgactgcttcatatttccagaaatccttcacatttgtggtatagttcaattgttaagagagtaaggaaggttttgagtaatttttgggagatcattacagagacttggacgaaacactatataattagctgccacagttgctgcttttggaataaaacctaatgtgaacaacatgaaggcagggactatgtctttttaactgttcttacccagtatrcagtgttgtgcctggcacatggtgggaatatagtagttattgtaagaataaaggaaaataggatgggagagaagaaagaaaggggaaaaaacctaagttaattggacaaagtgataaattccaggtcattctgttgtgattgttttggctgatgcattgccctcccagactaataacgaacagaaatatgattttctactgagcatgaacatggtataactttgagaaacctgttatcaaagggttttaagcatttttgttattagttcacagtgactcaatttttccttctgctcatttttgttgggtagtgttgggaataacaagactcaagttgcatacagtatttcaaagaaagctttcatgatgactattaccatatttattatcttttcttttgaaactataggtccctatgaccaatcctctttttgaatggactgagtaccccctcctagtagggcctaccactttctaaactgccgcrttgaccatcctaagacacttcaaatactctgtaacatatatgttatatttaagaatcaaggtcattcactggtgagagaaagtggtctatttttcatctttttaataaggttgttgatgaaatggtgttggaatttaggactggcataggacttgaataataaagttcataattcagtgatgaaactcatctatcccgtctttatgcatttcttgtcattttatttactgttaattttatcctggttctgtttggagttaggagcaccgatctatgttagatggtcctagtatcaatgcctctttagaggtatggtctccacagggagagatggatgctggatttgtagccatttatatacaccgggtccagacagaataaagtaaaaaaaaaaaaaaatggccaaaatcagcagatggtgacaaaagtgatccctggctgccctcattgttcattagcataagacacttccaccagccccatggcagtttataagtgctatggcaacaaccttgaagtcaccactcctttccatggcaatgacctggaagttactgccccttttctagaaagttctaattaacctgcctgtcaattcacatcagcctgccccttaatttgcatataattgaaagtggatatacatgagtataaatacagttgccaacagcccatacttagctgactttgggtgcacagcctatgagttagcctgctctgcaaggagcagtaccgttcaagcaaatgttgctatctaacaccactaacttaaccttaagttctttcctagccaaagccaagaacttctgctaagccccagttttggggctcacttgtcctgcattactaggaggaaagttataaaaaaagaaaatgttttagatgataaattcttgggtttaaagtccatgtttcggtcctttagttgacattaatgatcaataattatttttattatgtaatgtaatacttatatcaaaaatgatttccatattcccataatgttatttatcaaataatttcatatctatgagagattgttactcacttcaagataggtattatacaatgccattttaattttcctggttctccaactgtgtcagacttatgtaatatttaccaaatcaaacttacttatgagtaccagcctagaggaaggctataattgtttatggcacagataatctcattctaaccttttagatctcctttgataacttttaggaatgttatataagtcttttagtaaaaaagaaaaacaaaaaatcccaaacctctattatgctgtgagacctgaacctcacttctgtaactcccaggattaggcaatttaaagtacatattcctttattaagtgtcatgggtagcaatatcttgttactactgtttagaaaaattgctttcatttgtggaaggctctaattgttgctggatgcaataaatgtttggcttaccttattcatttgcccagaccaatagacccttaaagtgtgaatagattccaaacaaaagaaaaaacctacattaacccatggagtgaaatatattttgattgcatgcattatttgggaggggggaaatgagggtgacctttgtaaattccatacatcttactttcagtctggagaatttgcttcccacatttaagtttttatagtggactttgtttttaaaatgtcggctatacagcatgcattttccttttttgattttagcttggtggatttttatgattcagagagtttttttaaaggaacacttaacttctgtgttttactttatgatttgtcaaaaagtactaatttttttgggggccgtgtatgttaatgtttagaatgttggaaaaaattttaggcattactatagtggtgtctgtatacaatatacaatatttgggtttcaataaaatatgaaaaattgggaaaatagaagatgtatcttatagatgtgtaagaaaaatgtacattataaattttgttaaaaatggtcaagaataccctttgaattgttaatctaagacatgcataaaacattttgtttgattaattttgtttttgaataaatttttcaggccaggcatggtggctcatgcctgtaatcccagcactttgggaggctgaggtgggcagatcacctgaggtcaggagttcaagaccagccttgccaacatggtgaaacccatctctactaaaaaaatacaaaaattagctgggcatggtggcacatgcttataatcccagctactcaggaggctgaggcaggagaattgcttgaacccgggaggcagaggttgaagtgagycaaggttgcaccactgtactccagcctgggtgacagagtgagactctgtctcaaaaaaatatatatattttttcatattaaaattacttttgttttactgcctgaagtttaactccataattataaatattatggcatctacaccaaataggggagtgtcacatgctgtgaatctatttaaaatgtgtgacttgtagattggagacaatctgaaaatctttgccttttatttatagtgtttagactctttttatttaatgtaattatctatatggttgggtttaatttagcgtctttaaaacattatttatttatttattttaatgagacagggtctcactctgttgcctgggctgagtacagtggcgtgaccacagctaactgcaactttaacctcttgggctcaagtaatcctcccacctcagctcttgagtagctggaactacaggtgtgtgccaccattcccagctaattttttattttaaatttttttaaagatggtgtctcactatgttgtctaggctggtctcaaactcctaggctcaagctatccttctgcttcagcctcacgagtagctgggactataggtgtgtgctaccacatctggctaatatttttgtaaagttggggtcttactatgttgcctaggctggtctcaaactgctagactcaagcaatcctcccacctaagccgcccaaagtgctggaattacaggtgtgagccactgcgcctggccttaatttaccatcttgttatttttttcctatttgtttcatctacagagtatattttaaaatttttgtttcagctccactgttgtttaaatagctatactttttaattatggttgctttaaagtttacaataaatatctttaacatcacagtctacctttaaataatattattttacttaatgtatagagtaagaaccatagatgcaacaatatacttcactttcttccttactgctttttgtgttattattgccataagtcagaaaacccacagtacactgttgcggtttttgctttaggcagttaattatctttttaaaaataaggttaattaaggtataatttagagcaatgaaattcactctttttagtaacacagtgatagacattttatacgtgtatataacatgcaactaccaccacacttaagatatagattttttatttttttattattattttttattttttattatactttaagttctagggtacatgtgcacaacgtgcaggtttgttacatatgtatacatatgccatgttggtgtgctgcacccattaactcgtcatttacattaggtatatctcctaatgctatccctccccttcccccaaccccaagacaggccctggtgtgtgatgttccccaccctgtgtgcaagtgttctcattgttcatttcccacctatgagttagaacatggggtgtttggttttctgtccttgtgatagtttgctcagaatgatggtttccagcttcatccatgtccctgcaaaggacatggactcatccttttttatggctgcctagtattccatggtgtatatgtgccacattttcttaattcagtctatcattgatggacatttgggttggttccaagttacccagtaatgggatggctgggtcaaatggtatttctaattctagaaggatatagattattttcatcatctccaaaggctttccatgcccctttgtagtcagcctgtcactcatacccctgacaaccactgttcatatttctgtctttacaagcttatgtcttccacaatgtcatagaagtggaatcataaagtacgtacatagccctttgtgtctggcttctttcattttgcgtaatgaaagaagatttatccatgttgttgtaggtaacagtattttgtatcattcttttgctgagtagattccaatatatggatgtgtgacaatttgttttttttatcaccagttgatggtcttctgggttctttttagtttttggtgatcgtgaataaagttgctgagttgcatacaggtctttgtgtggacatatgttttcatttcttttgggtaaaaacctaggcattggattactctgttggatgataaatgagtgttttacaagaaactgccaaagaagtttccacaatggctgcaccattttgtattctcatcagcatgggctctattgtgctataccattaccagcacttggtattgtcatttaaaaaattttagttatattgggaggccgaggtgggcaaatcacctgaggtcaggagtttgagaccagcctgaccaacatggagaaaccccgtctctactaaaaatacaaaattagccaggcgtggtggcgcatgcctgtaataccagctattcgggaggctgaggcaggagaannnnnnnnnnnnnnnnnnnnnnnnnnnnnnnnnnnnnnnnnnnnnnnnnnnnnnnnnnnnnnnnnnnnnnnnnnnnnnnnnnnnnnnnnnnnnnnnnnnnnnnnnnnnnnnnnnnnnnnnnnnnnnnnnnnnnnnnnnnnnnnnnnnnnnnnnnnnnnnnnnnnnnnnnnnnnnnnnnnnnnnnnnnnnnnnnnnnnnnnnnnnnnnnnnnnnnnnnnnnnnnnnnnnnnnnnnnacccgggaggcggacgttgcagtgagccgagatcatgccattgcactccagcttggtcaacaagagtgaaatgccgcctcaaaaaaaaattttttttagttattctggtagacttctattagtactgtatctcattaagttttaaatgtgcttttccctaatgactaaatgattttgaaacttttttcatgtgcctatttgtcatctctgtctctttggagcaatgtcttttcaaatttattattatttttaattaaattgaaagagctttttatatattccagatataaatcctttatgtgattattttatacaaatatttctcctagactgggtttgtgatttcattttttttgaaatatgtatacgttatggaatggctaaatcaaattacctcacatacaaaataaatttacttcatttatttgtggtgagaacacttaaaatayagtcttttagcaattttcaagtatataatatattgttattgactatagtcactatgttgtacaataggtctcttgaacttattcctcctgactaactgaaattttacatcctttgaccaacatcttcccatcctcctactccctgcccagcccgttcattttaagtgtctttcaaagagccaaaatttttaattttgatacagttcaatttttaaatttttgtcttttacagagtatgcatttgagatatctttacctaagccaaggccagaaatattttctcatacattttcttctagaaattttatagttttatgttctatatttaggtctatggcccattgtggcttcatttttatggaaggggcagggatcatttgttttgcctatggagctccaattattcacgactatcttttgaagatattaaaaattgrgaacattttctgttagagtttcccttatagttaccatttctaacactcttcattcttttgataaatctacattgccattctgtattttttttccatctaaagaactttctttaacatattttgcagtgtagagctgctgctgatgaattctctctaaacatttatttgtcgaaaaagtctttgttttcacattagaaagatatttttgcctaaacggattctaaattggcagttttaatttctccagtattttaaagatgttgttttatggtctttgagcttgcatatcttctaatgaagagtctgctgtcactctcatttttgttcctttatatgtattgtttaatttttccccatgcggctgcttttaagatgttctttttatgattgttttccataaatttgattattattttccttgcatcttcttttatttcataattatttttaaaaacaattgctgttgatacatatttgtacgtatttatggggtaccatgtgatattttgttacacgcatagaatgtgtaatgatcaagttagggtgtttaggatatccatcatctcaagtattgatcatttccctgtattgggaacatttcaatcctttcttctattttgacataaacaatacattgttgttaatgataatcactctactttgctatcaaacattagaatttattccttctatttgtctctctgtttgtacccattaaccaacttctcattctgcaccctcccaatcacacattcttcctaatctcttgtcgacattctcatgattaacctcttttagctctcacgtatgagtgagaacatgcagtatttgtctttctgtgcctggcctatttcacttaacataatgacctcaagttctatccatgttgcaacaaatgacatgatttcattcttttttatggctgaatagtatcccattgtgtgtgtgtgtgtacatatacttttatatatgtttgtatatatatatttctttatcttttcttccattgatggacacctaggttggttccatagctttacaattgtgaatagtgctgcagtaaacagggagtgcagatatccctttgacatgctgatttcctttcctttggaaaaatacccagtggcaagattgctggatgatatggttgttctatttttagtttgttgagaaatctccatactgttttccatagtggttgtactaatttacattcccactaagagtgtataagagttctcttttctttccatcctcaccatcatctgttattttttgtctttttagtaatagccattctaactggggcaagatgatatctcattgtggttttgatttgcatttccttgatgattagtgatattgagtatttttaaaaatcatatacctgttggccatttgtatgtcttcttttgagaagtatctattcatgtcctttgcccacttctgaatgggattattattttttggttttgcagttgaattccttgtatattttggatgttagtctcttgtcagatgactagtttgcaaatattttctcccattccacaggttatctcttcattctgttgattatttcctttgctattcagaagctttttggtttaatatagtcccatttgtctacttttgtttttgttgcctgtgctttgggtcttagctataaaattcgttgcctagatcgtgtcctgaagcacttcccctgtattttctcctagyggttttatagcttcaggtcttatattaaagtctttaattcatcttgagttgacttttatatatggtgagagataggggactagttttattcttctgcatatggatatccagtttttccagcactatttatttaagagggtgtcctttccccagtgcatgttcttggcacctttgtcgaaaattagtggatttatgtaaatatgtggatttgtttctgggttctctgtattgttccatgagtctgtgtgtctgttgctatatcaatactatgctgttttggttactattgacttctaatatatgttaaatattttgaattctatttctgtgaaaaatgacattggtattttgataggggttgcattgaatctgcaggttgctttgggtagtatggtcattttaacaatattaattcttccaatacatgagcatgggatgcctttccatttatttatgtccttttcaatttctttcatcagcattttgtagtttttttggtaaaggctttcctcctccttggttatttattccctaggtatttttttttgttgttgcttttgtaaataggattgccctcttggtttctttctcagctagtttatttttggtgcatagaattgctactgatttttgtatgttgattttgtatcctgcaactttattgaacttctttattagaggtaagagtatttatttatttatttaaatagacaaagtcctgctgtgtcacccaagctggagtgcgatggcatgatcatggctcactgcagcctcaactgcctgggctcaagtgattttcccaactcaacctcctgagtagctgggaccataagcatgcaccatcacacttggctaatcttttaattttttgtagcgatgagatctcattatattgcccagggtagtcttgaactcctgggcttaagtgatctgcctggcttggcctcccaaggagctacgattacaggtgtgagccaccatgcctggtcagtttgacttcttcttttccaatttgggtgccttttatttctttctcttgactaattgttctggctaggactcccagtattatagtgaataggagtggtgaaagtgggcatccttgtcttattccagttattagaggaaaggctttcagctttcccccattcagaatgatgttatctgtggcttcgccatatatggactttattacattaaggtatatactttctatacctagtttgttgagagtttttatcatgaagaggtgttgaattttatcaaatgccttttctgtgtctattgagatgtgggttctttttttttttttttgggcttggactttactttgttaaagtttttggatccatgggtttatagttttattcaaatttggaaagctttggctgtattcttcactttctttcctctctcttttagagctcatatgtatgttagactatatggcctattcatttctttttaattcttattttctctcactgcttcaacttcaatcatttctattgctatgtcattgctttctactgttaattcaatccagtgtgttttttttattttagatattattttcttcctctctatgagtttttaaaaaatgatatggggtcttgctctcttgcctaggctggtgttgaactcctgagctcaagtgatcctcctgctttggcctcctaaaggctgagattaaagatgtgagccgtggtgcctggccctctctataagttttaactgtatccttttatatctttcattcctcattttgttcatgttttcctctgcatttttcaagatatggagtacattttaatagctgttttaacattgtacctgctaatttaataatttctgggtctgtttttattgattgatttttctccgtgtcatgggtcatatttttctgcttctttgcaagactgtacattaaaaaaaagtttaaaaattattgtggtaatattcacgtaacataaactcaccactttagaaaatttaaaatgcataattcagtgatatttggtatatttataatgttgtgcaaccactaccagtgtctagttccaaataatttcatcactccaaaaacaaaaccactttttggctgggtgtgrtggctcacctctgtaatcccagcactttgggaggctgaggtgaaaggattccttgagtccaggagtttgagaccagcctagtcaacatagtgagatgccttctctctgaaagttttaaaaaattagccaggcatggtagctcatgcctgtggtctcagctactttggagaatgaggtgggaggattgttgagcccaggagaytgaggctgtactgagctgtgataatgccactgcgctctagcctgggagacagagcaagaccctgtctccagaaaacaaaatgaaacaagataaaacccaaaactactttttaagcagtcactcaccatttctcccacccccaatcccagggcaataataatttttctgtttctatggatttacctattctagatatttcatataaatggaatcatgcaatatgtggcctttgtttttagcttcttttgcttagcatgttttctaagtttatccatttttttagcatgttttagtactttatttttattggcgaatactatttcattgtgtagctctacctcaatttgcttatctattcacctgtcaacagacatccttctaccctttagttattgtgaatagtgcttccatgaatatttgtatatatgtttatggttgaacaactgttttctttaggaagatacatagcagcataattgctgggtcacatggtatttcctgttgaactttttgaggaagtgccaaactattttccacagcatgtgcacattttatattcctaccagcaatgtattgagtgtgctaatttctattttagtgagtgttaaattgtgattttgattcatattttcctaatgaataatgattttgagcatcttttcatgtgcttgctggccatttgtatgttttctttgggaaatgactagttcagccttttgctcatttaaaaattggcttgtcttttcattattgagttgtaagagttctttatgtattataggtagtaggccctacttagatatgatttgcaaatattttcttcagcctgtgggtcttttcactttcttgatagtgttctttgatacacaaaatttttcatgtcatcactggggacttcaatactgagaactaaaagaaaatgaagatgattttttttttttactggcttagaaataaaaaggcctatgtcattgccattcacattttcaatagaagctcatattattgatattgtaaaattctaaaagtgatattaccgttaaagtttggacaaaaatatatggtggtatatattgttctacacagtaaatgtattccaagaaagttgcatgctcatttaattttgcttagttaaattcacttctaaggttggcatgaaggcacacacctatttgcatttaagataaagagttccaagataaagagttccttaataatgtacattgcctggcctgttagtaggtgctcaattaatgttactacttaattaatttttaagttttctaatagcagcatgtgtatttgtgtgtgtgtgtttgtgtgtgtgtgtgtaagtgtatgtatgtagactgttcttgatttggaaataaagtaccatagtttttcagaagtagagttagtagaccagttatggataatataaatattagcaatcatttaccaattactggtccctgattctgaaaaagaaaacaacccactgcattgatcacagttttcaaaataaaatctgtttgttgaacaaacttttgaattctaatggtacagagcattgggggtgcttaagaaatgtttttattcatgttatattaggattgaatatttctgttatagctcaacagaatttaaatggagctgcataactggttctgaagtcatcttgattttctgtttaattaataattcaagttattaaaaactcactcatgctgttgaatacagttctcaaatttttttacctagataaattctgtgggaccagtttgttgtgggaatttttttgtgtgtgtgactcagcagtttaacttaatagttcaaacaactgctttagaaatttgtttgtcaagtcatgatttataccattattttaaatttattttttattatactttaagttctagggtacatctgcataacgtgcaggtttgttacataggtatacatgtgctatgttggcttgctgcacccatcaacttgtcatttacattaggtatttctcctaatgctatcycttccccaagccccccattcccaacaggccccagtgtgtgatgttccctgccctgtgtccatgtgttctcatcattcagttcccacctatgagtgagaacatgyggtgtttggttttctgtccttgtgatagtttgctgagaatgatggtttccagcttcatccatgtccctgcaaaggacatgaactcatcattttttatggctgcgtagtattccatggtgtatatgtgccatattttcttaatccagtctatcactgatggacatttgtgttggttccaagtctttgctattgtgaatagtgccacaataaacatayatgtgcatgtgtcttaatagtagcatgatttataatcctttgggtatatacccagtaatgggattgctgggtcaaatggtatttctggttctagatccttgaggaatcgtcacactgtctcccacaatggttgaactaatttacactcccaccaacggtgtaaaagcattcctatttttcyacatcctctccagcatctgttgtttcctgactttttaatgctcaccaytctaactggtgtgagatggtatctcattgtggttttgatttgtatttctctgataaccagtgatgatgagcattttttcatgtgtctgctggctgcataagtgtcttcttttgagaagtgtctgttcatatcctttgcccactttttgatagggttgttttttttcttgtaaatttgtttaacttctttgtagattctggatattagtcctttgtcagatgggtagattgcaaaaattttctcccattctataggttgcttgttcactctgatgatagtttcttttgctgtgcagaagctgtttaattagatccatttgtctattttggcttttgttgccattgctttcggtgttttagtcatgaagtccttgcccatgcctatgtcttgaatggtattgcctaggttttcttctagggtttttatggttttatgtcttacatttaagtctttaatccatcttgagttaatttttgtataaggtgtaaggaaggtatgcagtttcagctttctacatatagctagccagttttcccagcatcatttattaaatagggaatcctttccccatttcttgtttttgttagttttgtcaaagatcagatggctgtagatgtgtggtgttattcctgtggcctctgttctgttccattgatctatatctctgttttggtaccagtaccatgctgttttggttactgtagccttgtagtatagtttgaagtcaggtagtgtgatgcttccatctttgttcttttggcttaggattgacttggcaatgcgggcccttttttggttccatatgaactttagaatagttttttccaattctgtgaagaaagtcattggtagcttgatggggatggcattgaatctataaattaccttgggcagtatggccattttcacgatattgattcttcctacccatgagcatggagtgttcttccatttgtttgtatcctcttttatttcattgagcagtggtttgtagttctccttgaagaggtccttcacatcccttgtaagttggattctttggtattttattctcactgtagcaattgtgaatgggagttcactcatgatttggctctctgattgtctgttattggtgtataggagtgcttgtgatttttgcacattgattttgtatcctgagactttgctgaagttgcttatcagcttaaggagattttggtctgagacaatggggttttctaaatatacaatcatgttatgtgcaaacggagacaatttgacttcctcttttcctaattgaataccctttatttccttctcctgcctgattgccctggccagaacttccaacactatgttgaataggagtggtgagagagggcatccctgtcttgtgccagttttcaaagggaatgcttccagtttttgcccattcagtatgatattggctgtgggtttgtcatagatagctcttattattttgaaatatgtcccatcaatacctaatttattgagagtttttagcatgaagggctgttgaatttcgtcgaaggccttttctgcatctattgagataatcatgtggtttttgttgttggttctgtttatgtcatggattatgtttattgatttgcgtatgttgtaccagcattgcatcccagggatgaagctgacctgatcgtggtggataagctttttcatgtgctgctggattcggttttccagtattttattgaggattttcacatcgaagttcatcaaggatattggtctaaaattctcttttttttgttgtgtccctgccaagctttggcatcaggatgatgctggcctcataaaatgagttagggaggattccctctttttctattgattggaatagtttcagaaggaatggtaccagctcctctttgtacctctggtagaatttggctgtgagtccgtttgcctggactttttttggttggtaggctattaactattgcctcaatttcagaacctgttattggtctattcagagattcaacttcttcctggtttagtgttaggagggcgtatgtgtccagggatttatccatttcttctaaattttctagtttatttgcatagaggtgtttatagtattctctgatggtagtttgtatttctgtgggatcggtggtgatatcccctttatcattttttattgcatctatttgtttcttctctcttttcttctttattagtcttgctagtggtctatcaattttgttcatcttttcaaaaaaccagctcctggattcattgattttttgaaggttttttttatgtctctatctccttcagttctgctccgatcttagttatatctttgcttctgctagcttttgaatttatttgttcttgcttctctagttcttttaattgtgatgttagggtgtcgattttagatgtttcctgctttctcttgtgggcatttagtgctataaatttccctctacacactgcattaaatgtgtcccagagattctggtatgttgtgtctttgttctcattggtttcaaaggacatctttatttctgccttcrttatttacccagtagttattcaggaacaagttgttcagtttccatgtagttgtgcagttttgagtcagtttcttaatcctgagttctaatttgattgcactgtggtctgagagacagtttgttgtgatttctgttctttcacatttgctgagaagtgttttatttccaattaagtagtcaattttaggataagtgcgatgtggtgctgagaagaatgtatgttctgttgatttggatggagagttctgtagatgtctattaggtccacttggtgcagagctgagttcaaatcctggatatccttgttaaccttctgtctcgttgatctgtctaatattgacagtggggtgttaaagtctcccattattgttgtgtgggagtctgagtctctttgtaggtctctaaggtcttgctttatgaatctgggtactcctgtattggatgcatatatatttaggatagttagctcttcttgttgaattgatccctttaccattatgtaatggtcttctttgtctcttttgatctttgttggtttaaagtttgttttatcagagactaggattgcaacccctgctttttttttgttttccatttgctttgtagatcttcttccatcactttattttgagcctatgtgtgtctctgcacatgagatgggtctcctgaatacagtacactgatgggtcttgactctttatccagtttgccagtctgtcttttaattggggcatttagcccatttacatttaaggttaatattgttatgtgtgaatttgatcctgtcattatgatgttagctggttattttgcccattaattaatgcagtttcttcatagcatcgatggtctttacaacttggaatgtttttgcagtggttgttactggttgttcctttccatgtttagtgcttccttcaggagctcttgtaaggcagggctggtggtgacaaaatctctcagcatttgcttgtctgtaaaggattttatttctccttcacttttgaagcttagtttggctggatatgaaattctgggtggaaaattcttttttttaagagtgttgaatattggcccctccctcttctggcttgtayggtttctgcagagagatctgctgttagtcttatgggcttccctttgtgggtaacccaacctttctctctggctgcccttaacattttttccttcattttaaccttggtgaatctgaaaattatgtgtcttggggttgctcttcttgaggagtatcattgtggtgttctctgtatttcctgcatttgaatgttggcctgccttgctaggttggggaagttctcctggataatatccttaagagtgttttccaacttggtaccattctccccatcactttcaggtacaccaatcaaacgtagatttggtgctttcacacagtcccatatttcttgtgggctttgttcatttctttttactgttttttctctattcttgtgttcttgctttatttcattaatttgatctgcaatcactgatatgctttcttccacttgattgaatcggctattgaagcttrtgtatccatcacacaattctcatgctgtggttttcagctccatcaggtcatttgaagtcttctctacactgtttattctatgtagccattcatctaaccttttttcaaggtttttagcttccttgcgatgggttagaacatgctcctttagctcagagaagtttgttgttaccgaccttctgaagcctacttctgtcaactcttcaaactcattctccatccagttttgttccagtgctgacaagaagctgcaatcctttggaggagaagaagtgctctggtttttggagttttcagcttttctgctctgatttctcctcatgtttgtggtttttatctacctttggtctttgatgttggtgacctacagatggggttttggtttggatgtccttttgttgatgttgatgctattcctttctgtttgttacttttccttctaacaggcccctttgctataggtctgttggagttcgccggaggtccactccagatcttgtttgcctgggtatcaccaacggtgggtgcagaacagcaaatattgcagaacggaaaatattgctgcctgacccttcctctggaagctttgtcccagaggggcacttgcctgtatgaggtgtctgtcggcctctactgggaggtgtctcccaatcaggctacatgggggtcagtgactcacttgaggaagcagtcagtctgttctcagagctcaaacgctgtgctgggagaaccagtgctctcttcagagctctcagacagggatgtttaagtcttcagaagttgtctgctgccttttgttcagctatgccctgcctacagtggtggagcctatagagacagtaggccttgctgatctgtggtgggctccgcccagtttgagctttctgtctgctttgtttacctactcaagcctcagcaatggcggatggccgtcccaccacccagctgtagccttacaggttgatctcagactgctgtgctagcagtgatcaaggcttcatgggcatgggacccgccgagccacacatgggagggaatctcctggtctgccggttgctaagattgtcgaaaagcacagtatttgtgtgggggtgtactgtttttccaggtactgtctgtcacggcttcccttggctatgaaagggagatccccgaccccttgtgcttcccaggtgaggcgatgccccgcccttcttcagctcaccctccatgggctgcacccactgtccaacyagtcccagtgagatgaaccaggtacttcagttggaaatgcagaaatcacccatcttctgcgtcartctcgccgggagctgcagactggagctgttcctatttggccatcttggaagcgaccttgatttataccattatttttataacaaacatcaaataaccatcatactattattgccagcagcagattttggaaatggtacattcaaatgtgtaaagttattgcatatgaatgaagagagatattatttcaatgttatatttttattactagcttctgtttttattaaggataatgaaaaccttatgtctggccctgtgaacaaaactattgtgacctttgatgtgacccacctgttgtgctttcacaattgataatagtcccctcatgtgagggtgatctgtaaaataacaatgtcctagcaagatggaaaataacatttgcaaattgaagttgcagaaattgaaatatgcttgggtcatgtcctaaagtactaaaaataacttatctaaccaaatattttgagagaagaagatattgacagatgcctgactcacagtgcctttttcaggtagaattgttgattggttgtagacttgtctattaagcttctgatagacttcctgaatcagtgtttggtaatttttacaaccagaaaacatgctaaccaatgcctaggtcttaggaattcccaactgttgcatttatggaaaataaaaattattaatttatttggcaattaagacttttttggtttgtttttgtttttttttgttaagacagggtctcacccttttacctaggctagagtgcagtgttgcgatcttggatcaccacaacctctgcctcccagggtcaagggatcctctcaccttagcctcttgagtagctgggactacaggcatgggccacagttcccagctaatttttgtattttttgtagagacggggttttgccatgttgcctaggctggtttcaactcctgagatcaagtgatctgcccaccttggcctcccaaagtgctgggactacaggccactgtgcctggccaagaccaattttttgaatcatgcttcaaaaaagaaagaaagaaatataagtaatttgcttatttgatttttggggcataggtataaataatagctttccctgttagacaatgtctgctctgggtttactgggagggtagtctgtcagctaattatatacattttgtagatacatttaaaaacaccatcatgtagtagatattttcacgagcttgcacaatcttctttagcatatccattcttagaaagatctagtgatgatatattcagtgagtgaacatcagtatctcaaacaaaactaacaatgtactactgcccttcaatatgcaggtcaaattccatcattatgaagacattgtattataaaaacattgacatatctctgcttgtggcttaggttaaggataattcctaactagtcaatactcagtttaaatcttctgcagaaatctttccctcttcagcaattatgtggacattaagtaccatagctataactgttgatgaatgttccaatgataggaactttgtagaaaaaggaaaaggatatggcatcaaggctccagttgaagatgtgatggacgaagcttttctaaatgtctcttgcttggcccttagcattgctgctgcagacatcagtgaagtccctttcctgcttggggtgtttggggtgtgagggtcaggaggacagtttgttcttggggtccccagacaaaactcaatgaatattttcttatagaaactggtgttagttataattcagtgctcagccattctatgagtgaagtggcatagttttctaactcctattggcatcattgtttctatgggaaagtacattccaaacttttgaaactaaatccatttgtgtgttgggaacttctgatatttccaaagactataaaactgcattgttttagaattggagggaacttggaagccctttatttcaagttcattttatatacaaggcaaagttctagaagaaacctaagtccaacttcgctggaaaaaaatgtgatcttatttaaaaaatgttttaaaactattaaaaaaatcagtgttatctataactttctttcttttaggttcctagtctcttggtttttaaagttttcaaggttctgtgatatgcaggcctaagaagtgctcatttgagaattttctaggtttttctatatgaagacttttgcatcaccaaccaatattgtatgatatatagattaagagatgaataagaatttgaatgaataagaatattggacttattggttctgctgtgccattctatctaatacagtgttgaaaatgtgttatggttgacaagtcattactttaaattgccagttattgattctgatttgatacatttaagaaaattcctaattatgtattaccttgaaactttatgtgcttttgagacatagactggtatgtaaggtgcacacaagacaaaaacatgtgctcaacagatgtagtgttatttgttttcaaaaactgatcatcaaaattatctttgtttggaactgtgaactttatttttatgtgaatttttacttgatatcttattggttataaataaaactgaaggaaatatatgtttattttaaaaaatgacacaaatttattgtcaccaaatgacataatatgattattcttgtgtttgggcactttcattttagtatttaggttttgtttattatctctctctctcctgttcaaacgtgcatcccaataggacaaaattaaaagttagcaatattactctttttcagaagacaaaatttcatattttcaatgagggtatataatctttaaaacttttatcactttaagcatcttcagcttagggtgaaaaatgtagcaaccattttctgcttctgcaaaggaatgacaagaagttaatacatgactttcaagcatgttttccacctttaacgtcttcagaattcaaatttcagaatatgacttctcagatctcaagatgcaagtatttttttgatcttaatactctttattgatatttctattaattctccattttgtttagtttttaggggttattcagtttttcagtcacctatcatcttacccagcttcatagactaaattatgccaaaaatattaaagatatattcatttagctttaaatactatgtttctattgcaaggtactgatattatatacttttgatttatgttgaacattttaatgatttctttgctgaatgaatataattagtatgctaagtattatgttttaaaaagatgccaatctgtaattttgtgtctaggtattttttgatgataaagggcatcaatattaaatgaaattttaatttagtgatttcattttcttgaaaatatttctatcagaaattcatattatacttgcattatgctgaacatgatgaaacattctcttctctttcccttggcrtgtccttattgcaacacacaccaaaatatacagatgtttaatttaaactgaaatattcctccatagaataaacagaatatctcacctatgaagagtgattacactttgtaaatttgttttaagacctttgtaattcacagcttctagctttgtgtttggtgcttgacagtactggcatatcatgcttcagaagatatttaggatatttttgaaccttgccattatatcactgagaccagaagttgatatttagactgcattttattttgggcttaaatgttaaggcatattatgactaggtctgtttttataaagtattttccttcaattactctggagtatacattgttattttaaaatgttttgaatcatgatgtagtggacatgctctaagtaggattcagtagttgagatttgctaaggagactacaagaaaccagttttcttttattattaagtgagcaagattactatgagatataattgtatattaagcaccaggattgaacatttgttacagaattgaatgagtttttctgatttctgaagaattaatttagagcccagtgtagaagagattaaagtcataggactataagccagttagctagctttgtctcatttcttgatcatacagtggattaaaaaactgaagagtaaggataaataggccctttcctaaatagagtagtgttaacagagagggttctttgggattagttctaagactagtcacttaaaaaaatgaatttgaagaggwagtatagggaaatctcttatttccttgaaatgagaagcatgttacaaactttttcaggtagaaaaatgctagttacgaatggataatataaaaagaataccacatataggaaaataagaagaaaatggcataggaagtcttcacttgcccaattggagattatttccatttttatttctgtttaagacaaagacaacaaagcttaactcttacttactatctaaagtaggcagaattattttagagatttctgtttgtatgtgaccaaaaaatcagaagaaatattggatgtcatgaggaaaaatatttgaaacaaaatacaatagactcttgtccttaagcgaaacaatgtagtagcaaactggctggaaaaccaggttttgttattgtatattcagaaagaaatacggatcaaaagaaatcaagaaaaagattagcgagtatgagtgaattcacattaatatagactacacataatgtaagactttagtgtggaaagaccaagtctgcgagtggatattatttaagtgtaaatacttatgaaaggtatatttagagtatgggcttttaattcagaagacctggatttatatccagattccaacatgtgacagctgcaagtagaccttagacctcaagtttcctcattaaaaaaataggaatgtaatatttattccatagggttgatatatatattaagcaaggttaaatttgttatgacatgagtaaaagaacatgacacagtagaatttaatacattcagcttgaattaaatatatgcccatctctttaaattatattctttttttattataaatgtatatatgggtccagtgctgattttttcttattgcttatcttcaaatgggggcattttaatactggatagctacttgctgaaaaataatattaggaggggttgtgtaggggcaagttttaaaaaattagtcccagcagatttaactgggatttgttgtcttgaaaatcctcatatatgtatatatattttttcctttctctctttctctctatatatatctatgaggaaacattctcttctctttcccttggtgtgtccttattgcaacaatcaccaaatttacagaagtttaatttaatctgaaatatatatctatatagagatgtatatctatctatctgtagaggaacatatatatatatatagaggaatatatatattttaacattatatatatttatatatatttacattctatatataatatatttacattctatatatatataaaatatgtttacattattttcctatatctctccttagtttttggcattagaagtttggtgtggcttacaacraagcaccttaagtcaggctatccgtgttgtgatctggtcatctctgcttcctttccttcacctcggacagtgtcttaggagattagattatagacaagatagtctgtctgcatgtttcttctttattcagctctactttaccttcaattcatcagtgtggagctgggatatttcttcgcaggaatatttcctattagttctgttgtctataatggccctaagtcttatcactttaatcaaaggagaatttgatatcctttcatacgtttagagaaatttattcttgcttgaacatgaggtggttggtgtcaggttgtattctcccttattctggctcagatatcaatgtatttggcagatatttttcatactgtggcttgagcttttaggtgtttcactgtatcattgaagagtcttccacctcccattttgcattcattttagttgttttcaaaggagaagggtaaagaaaaaattgcttttatttcttcactttaacaagaattctgaattgcactttaaaaaaatgtttatatcctctactccttttatgtcaaacattttctaacatttactgagtatctaccatgtgttaagccttgtccaatgaggtttatgcaattattatctctcttgatccttaaaaatcctgtatattttcaaagttgtctcatttaaagattagaaatctgaggctcagagaagctgatagtgcagtgtcacacagtaatagagctggaattagaggctagatctatctgactgcaaagctgtgtttttttttctgttatatgtcatccagtccttgtttatacaatcacaaattttggataaatgagattttatgctgtgtttcatagttagactttctactgccaccttttggctaatttaaatttaataagcgtttctgtacattttatccacccacacatataagcaataataataataataggtcataaatttattttgatgttttgcatctgggtgtgcacagacacatactgcattggtaagatttttttctcttttggattatctgttaaagggatcaatgttaaagggtctgagtgccaccaactagaatagtccactgatacctgagaatgaacaaggtaatatttctgagatacattatttatgcaccaattaattccattcttgtttaatataccgtgtaatttatttgacattctgaattacaggaaaatatccaaagccatgataggtaaatatagcttatttattttactggaagattgtgagtggttagctggatagcaacatttggggacaaatgtcaaggttgaagaggagaatagttaggccaaattgtatggacaagaattgactgctgcagttttcttctcatgcctgggaaaatatttgcctgtttttctttttctctccattgtgtgttagagtaacaggatcttccaatatagccaaacraaatagcatggaatgcttatacaagacttaattagtagtaatgtactgtatcactcggagattttggcagtctggctatctggcttggaggcctgctataagattttccagctttctgtttcaggaactaatatcctatggtgcttctataactctaattattatttacctgatggttagacaattttctgctggcataataatgtattcagtgttttaattcttgaattaataatatcaacaataacaacttagaagttacattgctattatagtatgttaatatttcaaatagattaaaactgtggtagaaattggcagacatatcgtggtctgaagctccaaagatgtgactcagataaaaaatgtgttgagagcagcctgtccaggtgcatcagggatggcatgggttttagatttttaaaaagcactcaatgcccrtaaggtaggagaccaccagtctcaaaacagtcactagagtgaatacatagtagtattcaggcagctacaaaataactgggtgtgtacttttgaaggaaagggaaacaccctagtgcttttcttatggcctgtgaaatcagagtctaaaaagttttcccctgaggcaagctatttttgaaagtgctcttgcccagagaagtgctatcaatttctcttcttattttccagttccttgggttctcattcacatatcttctcattgttgtgctcatttctgcctatcatttcataagtctattttcatagacgttcccctctttttcactacccttacatttccctatttcacttagaaaggttacctattgaaatctgtgatagccaatactggttttacacaaggacagatcccatctgttaagttaatgcttataacttgacagagaaaaactgagtgtgaatgtgggatggaagtaagagcaaatgctttggagtcacatattcgtggactgggaccctagccctcccttcacacaccctctgaataactttggacaagttagattacttctctgagtctgaattttctaaaagatgagaataacgtcttccttgaaatattggtatgagatgtaagtgagataacttatgtaaaacacagctacaacaatgattggaatatagtaagtgtgacatattgtacttatttcttcatttcttatagagtaagtatatttcctccttcccattgactttggccatgtaattatgagcagacttttagaaacattgtaaaatttctaccgggcctcttatcctgtgccttatgttacaagaagggcatgtttcatacgtgggatgtacctgcaaactgagatctagaataagaaaataatggagcgggcttgaatctgactcacagccttgagcagagacacagaagctgacctgcatccaccaacttgtaatacaacctgagaaatgaatatttatttttgtaagtcactaagattttgaggttgttatgtaccataaaaccatttcttttaccaatttttgtgttttggagctttgctgccgtcacaatgactcccgaagtcccagtggcttgaaacgacagacatttatttttcagtgatgggtttgcaggttggctgtggctctacttgtctctgtttgtttctctgtatgtcatttcagtctgtgattcaaattgaaggagcagctcctatctgggacatgctgttctccaaacagaggccaagaatacarcactatgcaggtgcattaatagttttcgtacagatatggcatttgttacatcttctcatattctgttagccaggttatatgtctaagcctggtgatgaggcaaagaaatgtatttcatctattgggaggcaaaagaagtcacatggcaaagggtgggaaaagataatttggaacataatacaacctaccacatgtgttaggcttctaagacatgttagattccttccctcttcagcacttatcttcccatttcaggattactgagcaagtataaaatatgaatacatctgggagaggtaaattagattaacttaatttcacccagggtagcaattaaatactgttcccagagcaggttccagctgagggttgcaacaaaaaagagtaaagaaatagttaaatattagaaagtggaaatgcaatttcatgaagctgtcagtttccaggattctaaaatgaagtgtctgtggcagtgacccttttcttttgactaattgcctaggttgatttttttttccctcttcagtgctctaggaatttttatgagcctctttaaagtaactgagatgccagtcaggatacttgcaatgaacagctgatatctggctgttgctcctgagtgaaaagtcctttttggccgctggagcttcttctttggattgggatctactgtattagggcatgaaagtttgtttaaaaagtgtttctatctattatataatctgccatagttccttctccctacatttatgcatgtaggtgtgggtaagagtatcttagaagatgtccggggaaaaacttaaaaactttatagaattaagaggactgtagtcctcaatgccacatttgagttcattctgtgaccttaatttctcttttgtgttctatgtctctattttcttgccagtttaaaaatatctgggtcttattttaagtaaaattgatatacgaaaggctggattaatatttagataagttagtacttttaaagttagtatcacattatgaaatttgggagagagatttactttatttatttattttaatttattattattatactttaagttttagggtacatgtgcacaatgtgcaggttagttacatatgtatacatgtgccatgctggtgtgctgcaccaattaactcatcatttagcattaggtatatctcctaatgctatccctccccactcccccsaccccacaacaggccccrgagtgtgatgttccccttcctgtgtccatgtgttctcattgttcaattcccacctatgagtgagaacatgcggtgtttggttttttgtccttgcgatagtttactgagaatgatgatttccaatttcatccatgtccctacaaaggacatgaactcatcattttttatggctgcatagtattccatggtgtatatgtgccacattttcttaatccagtctacattgttagacatttgggttggttccaagtctttgctattgtgaatagtgccgcaagaaacatatgtgtgcatgtgtctttatagcagcatgatttatagtcctttgggtatatacccaggaatgggatggctgggtcaaatggtatttccagttctagatccctgaggaatcgccacactgacttccacaatggttgaactagtttacagtcccaccaacagtgtaaaagtgttcctatttctccacatcctctccagcacctgtagtttcctgactttttaatgatcgccactctaactggtgtgagatggtatctcattgtggttttgatttgcatttctctgatggccagtgattatgagcatttttttcatgtgtcttttggctgcataaatgtcttcttttgagaagtgtctgtttatatccttcgcccacttgttgatggggttgtttgtttttttcttgtaaatttgtttgagttcattgtagattctggatattagccctttgtcagatgagtaggttgcgaaaattttctcccattttgtaggttgcctgttcactctgatggtagtttcttgtgctgtgcagaagctctttagtttaattagatcccatttgtcaattttggcttttgttgccattgcttttggtgttttagacatgaagtccttgcccatgcctatgtcctgaatggtaatgcctaggttttcttctagggtttttatggttttatgtctaacgtttaagtctttaatccatcttgaattgatttttgtataaggtgtaaggwagggatccaatttcagctttctacatatggctagccagttttcccagcaccatttattaaatagggaatcctttccccattgcttgtttttctcaggtttgtcaaagatcagatagttgtagatatgcggcgttatttctgagggctctgttctgttccattgatctatatctctgttttggtaccagtaccatgctgttttggttactgtagccttgtagtatagtttgaagtcaggtagcgtggtgcttccatctttgttcttttggcttaagattgacttggcaatgcgggctcttttttggttccatatgaactttaaagtagttttttccaattctgtgaagaaagtccttggtagcttgatggggatggcattgaatctataaattaccttgggcagtatggccattttcacaatattgagtcttcctacccatgagcatggagtgttcttccagttgtttgtatcctcttttatttcattgagcagtggtttgtagttctccttgaagaggtccttcacgtcccttgtaagttggattcctagatattttattctctttgaagcaattgtgaatgggagttcactcatgatatggctctctgtttgtctgttattggtgtataagaatgcttgtgatttttgcacattgattttgtatcctgagactttgctgaagttgcttatcagctaaggagattttgggctgagacaatggggttttctagatatacaatcatgtcatctgcaaacggggacaatttgacttcctcttttcctaattgaataccctttatttccttctcctgcctaattgccctggccagaacttccaacactatgttgaataggagtggtgagagagggcatccctgtcttgtgccagttttcaaagggaatgcttccagtttttgcccattcagtatgatattggctgtgggtttgtcatagatagctcttattattttgagatatgtcccatcaatacctaatttattgagagtttttattagcatgaagrgttgttgaattttgtcaaaggccttttctgcatctattgagataatcatgtrgtttttgtctttggttctgtttatatgctggattacatttattgatttgcgtatattgaaccagccttgcatcccagggatgaagcccacttgatcatggtggataagctttttgatgtgctgctggattcggtttgccagtattttattgaggatttttgcatcaatgttcatcaaggatattggtctaaaattctcttttttgtttgtgtctctgcccgactttggtatcaggatgatgctgtcctcataaaatgagttagggaggatttcctctttttctattgattggaatagtttcagaaggaatggtaccagttcctccttgtacctctggtagaattcrgctgtgaatccatctggtccctcttttggttggtaagctattgattattgccacaatttcagagcctgttatgggtctattcaaagattcaacttcttcctggtttagtcttgggagggtgtatgtgttgaggaatttatccatttcttctagattttctagtttgtttgcgtagaggtgtttgtagtattctctgatggtagtttgtatttctgtgggatcggtggtgatatcccctttatcactttttattgagtctatttgattcttctttctttttttctttattagtcttgctagtggtctatcaattttgttgatcctttcaaaaaaccagctcctggattcattaattttttgaagtgttttttgtgtctctatttccttcagttttgctctgatcttagttatttcttgccttctgctagcttttgaatgtgtttgctcttgcttttctagttcttttaattgtgatgttagggtgtcaattttagatctttcctgctttctcttgtgggcatttagtgctataaatttccctctacacactgctttgaatgtgtcccagagattctggtatgttgtgtctttgttctcgttggtttcaaagaacatctttatttcagccttcgtttccttatgtacccagtagtcattcaggagcaggttgttcagtttccatgtagttgagtggttttgagtgagyttcttaatcctgagttctagtttgattgcactgtgatctgagagatagtttgttataatttctgttcttttacatttgctgaggagagctttacttccaagtatgtggtcaattttggaataggtgtggtgtggtgctgaaaaaaaatgtatattctgttgatttgggatggagagtcctgtagatgtctattaggtccacttggtgcagagctgagttcaattcctggatatccttgttaactttttgtgttgttgatctgtcyaatgttgacagtggggtgttaaagtctcccattattattgtgtgggagtctaagtctctttgtaggtctctaaggacttgctttatgaatctgggtgctcctgtattgggtgcatgtatatttaggatagttagctcttcttgttgaattgatcyctttagcattatgtaatggccttctttgtctcttttgatctttgttggtttaaagtctggtttatcagagactaggattgcaacccatgcctttttttgctttccatttgcttggtagatcttccttcatccttttattttgagcctatgtgtgtctccgcacgtgggatgggtttcctgaatacagcacactgatgggtcttgactctttatccaacttgccagtctgtgtcttttaattggagcatttagtccatttacatttaaagttattattgttatgtgtgaatttgatcgtgtcattatgatgttagctggttattttgctcgttagttgatgcagtttcttcctagtctcgatggtccttacattttggcatgattttgcagtggctggtactggttgttcctttccatgtttagtgcttccttcaggagctcttttagggcaggcctggtgatgacaaaatctctcagcatttgcttctctgtaaaggattttatttctccttcacttatgaagcttagtttggctggatatgaaattctgggttgaaaattcttttctttaagaatattgaatattggcycccactgtcttctgggttgtagagttyctgccragaratcmgctgttagtctgatgggcttccctttgtgggtaacccgacctttctctgtggctgcccttaacattttttccttcatttcaactttggtgaatctgacaattatgtgtcttggagttgctcttcttgaggagtatctttgtggcgttctctgtatttcctgaatgtgaatgttggcctgccttgctagattggggaagttctcctggataatatcctgcagagtgttttccaacttggttccattcttcctgtcactttcaggtacacgaatcagacgtagatttggtcttttcacatagtcccatatttcttggaggctttgttcatttgttcttattctttttttctctaaacttctcttctcgcttcatttcattcgtttcatcttccatcactgataccctttcttccagttgatcacatcggctcctgaggcttctgcattcttcacatagttctcgagccttggctttcagctccatcagctcctttaagcacttctctgtattggttcttctagttatacattcgtctaaatttttttcaaagtttttaacttctttgcctttggtttgartttcctcctgtagctcggagtagtttgatcatctgaagccttctcttaactcgtcaaagtmattctccatccagctttgttccgttgctggtgaggaactgcattcctttggaggagaagaggcgctctgctttttagagtttccagtttttctgctctgtttttttccccatctttgtggttttatctacttttggtctttgatgatggtgatgtacagatgggtttttggtgtagatgtcctttctgtttgttagtgttctttctaacagacaggaccctcagctgcaggtctgttggagtttgctagaggtccactcctgaccctgtttgcctgggtatcagcagtggtggcagcagaacagtggattttcgtgaatcgcgaatgctgctgtctgatcgttcctctggaagttttgtctcagaggagtacccggccgtgtgaggtgtccgtctgcccctactgggggtgcctcccagttaggctgctcggggttcaggggtcagggacccacttgaggaggcagtctgtccattctcagatctccagctgcatgctgggagaaccactgctctcttcaaagctgtcagacagggacatttaagtctgcagaggttactgctgtcttttcgtttgtcggtgccctgcccccagaggtggagcctacagaggcagggaggcctccttgagctgtggtaggctccacccagttcgagcttcccggctgctttgtttacctaagcaagcctgggcaatggcggggcacccctcccccagcctcgctgccaccttgcagtttgatctcacactgctgtgctagcaatcagcgagactccgtgggcgtagaaccctctgagccaggtgctggatataatctcctggtgtgccgttttttaagcccatyggaaaagcacagtattagggtgggagtgacctgattttccaggtgccgtccatcacccctttctttgactgggaaagggaactccctgaccccttgcgcttcccgagtgaggccatgcctcgccctgcttcggctcgcrcatgttgtgctgcacccactgtcctacgcccactgtctggcactccctagtgagatgaacctggtacctcagatggaaatgcagaaatcaccygtcttctacgtcgctaaygctgggagctgtagaccagagctgttcctatttggccatcttggctcggcccraggtttactttaagaagtttaacctggtgaatagaatttggaagacacggttaataaacaagttgatggctagccatatgcagaagatagaaacaacccctgtatctcaccatatagaagaattaactcaaaatggattaaagacttaactataagacctgaatctataaaaattctggaagaaaacttaggaaacacatttctcatcattggcctaggcaaagaattcatgactatgacctcaaaagcaaatgcaacaaaaacaaaaactgacaagtggaacttaattaaactaaagagcttctatacagcaaaagaarcaatcaacagattaaacagacaacctacagaattggagaaaatatttgcaaagtatgcatctaacaaaaaacatatccagaatctatgacgartttacacaaatcaacaagaataaaacaaataactgcattaaaatttgggcaaaggacatgaacagacacttcccaaaagaagacatgtaagtggccaaaaaatacatgaaaaaatgctcaacaacactaattcatcagagaaatgcaaattaaaaaccacaatgagttagcatctcacaccagtcaaaattgctattaaaaagtcaaaaataacagatgttggtgaggacgtggataaaagggaacacttatgtactgttggtgggaatgtaaattaacctctatggaaaacagtatggaaatttctcaaataactaaaaataaaactaccgttatctgacccagcaatctcgctagtaggtttctacccaaaggaaaagaaatcattttatcaaaaagacacctgtactcatctgtttactgcagcactattcacaaatggcagtcactgaatcaacttaagtgtccatcagtggttgattggataaagaaaatgtggtgtatatatatatatatcatagaatactactgagccataaaaaagaatgaaatcatgtcctttgcagcaacatcaatggaactagatggaagccattatgctaagttaaataactcagaaacaggaatactgcatgtttttgtgtataatcaggatcaaaatgatgagtacatgtggatacaaagatggaaataatagacaccaggaactccaaaagggagagggttggagagaggcaagggttgaaaaattacccattgggtacaatgtttactgtttgagtgacaaagtcaacaggatcccaaacgtcaccattatgcaatatactcaggtgacaaatctgcacatgtaccccctgaattaaaaaaaaaattggatttttattctagccactgaaaatgaaagttcatttatgtttttttcttctttgatctccactttctcaaaatctgctaagtggggatcaatagcctttctctctttcttactgggacatgtactagtggatttgaaagcgctttgctttcagaagaaaggtataagaggagtactgttagtgacataagtagaaaggagaggtctgctcagatatgaatagtatatactttggatagcaaatttactcttctttccagcttttgaaggataatgacttatgttcatgaattgagtttgagaaatagaggttttttgaaaggcagatacatttgttttgccatgaaacaattattgaacaaatcactgttgtattttcgaaaataaattaaagggtataagtacagcttatttacgttttttttgtgttgaaaatagttgccagtgtttgaagtagacaagatataaaatatgatgtggcacacagcacagcaaatatttcctttgatctatcatgggaatgtgttcatattaatttcttagctatgatttttctggataaagtttgtttgcgtaaggattttccatttttaacttcagtagacatattacagagctctggatattcagagaactcttctaggctttgtaggggtaattaaaataaataagacaagtcttctcccctcaatgagcttatagcctagtgaagaagacaataggtattatataaattattgtaatataaagcaaaacttgtctgtctaagcaaagtataaagcgcatgctatcattatgctaaagaataagagattaactccaattgggagagttaactttcaggagggcttcgtggaggaagtagcattttgtatttaacaggtagagttgaaggggaatgacgttccacttgctttgaggaaggaacataaataaagccctgaagggagggaaatgcagcctattttgaggaagcagtgaacaatcttatttggcagaattgttgtctgtcttcaagatgaagctgtgaaggaaaatttggccacatttatgaaagcctttaacaggacggtaaagatttcaggctttatgtgtaggactgctgtggagccaaacagactttgaacatactagtgacatgatcatatttatatttaaggaagataactggaaagattatggatggggcgagcaatgaatagacagaagatattagaattaaaggtatcaattaggctgtttagaagtttagttgagaggcagtaaggggttagtcaagggcagtgagagaatagaaagtagttaaatttgagaatcattttggaaatggcataaataatgacaaatatttcatttggaaatgaacctagtgacarattagttttcagactcaatatgcattttgtagatatactttagaggattgggcaaycagttattcaggaatacttttaatgaactgttttaaataatctcatcatagtgacagttatattttcttgatctttgatgcccatgtatctgatgtggccatgggtttaagtcctaacattgggtgtaatatatatagatgttaaatgtataggttatatgtaagaagtattgaaactgcattgctagcatgtctggctsttcctaagctcatatgagaatgaaagcraaagtactattttgagtggttataatgatgtcttgattgtaaaattttatattttcaaagaattttcattctatcatcacattcctctcttacatcaactctgacacaatggggttttctagatatacaatcatgtcgtctgcaaacggggacaatttgacttcctcttttcctannnnnnnnnnnnnnnnnnnnnnnnnnnnnnnnnnnnnnnnnnnnnnnnnnnnnnnnnnnnnnnnnnnnnnnnnnnnnnnnnnnnnnnnnnnnnnnnnnnnnnnnnnnnnnnnnnnnnnnnnnnnnnnnnnnnnnnnnnnnnnnnnnnnnnnnnnnnnnnnnnnnnnnnnnnnnnnnnnnnnnnnnnnnnnnnnnnnnnnnnnnnnnnnnnnnnnnnnnnnnnnnnnnnnnnnnnnnnnnnnnnnnnnnnnnnnnnnnnnnnnnnnnnnnnnnnnnnnnnnnnnnnnnnnnnnnnnnnnnnnnnnnnnnnnnnnnnnnnnnnnnnnnnnnnttttttggttgtgtctctgcccgactttggtatcagaatgatgctgtcctcataaaatgagttagggaggattccctctttttctattgattggaatagtttcagaaggaatggtaccagttcctccttgtacctctggtagaattcggctgtgaatccatctggtcctggactctttttggttggtaagctattgattattgccacaatttcagatcctgttattggtctattcagagattcaacttcttcctggtttagtcttgggagagtgtatgtgtcgaggaatttatccatttcttctagattttctagtttgtttgcgtagaggtgtttgtagtattctctgatggtagtttgtatttctgtgggatcggtggtgatatcccctttatcattttttattgcgtctatttgattcattgtctcagcccaaaatctccttaagctcataagcaacttcagcaaagtctcaggatacaaaatcgatgtacaaaaatcacaagcattcttatacaccaacaacagacaaacagaaagacaaatcatgagtgaactcccattcacaattgcttcaaagagaataaaatacctaggaatccaacttacaagggatgtgaaggacctcttcaaggagaactacaaaccactgctcaatgaaataaaagaggatacaaacaaatggaagaacactccatgctcatgggtaggaagaatcaatatcgtgaaaatggccatactgcccaaggtaatttacagattcaatgccatccccatcaagctaccaatgcctttcttcacagaattggaaaaaactactttaaagttcatatggaaccaaaaaagagcccgcattgccaagtcaatccaaagccaaaagaacaaagctggaggcatcacactacctgccttcaaactatactacaaggctacagtaaccaaaacagcatggtactggtaccaaaacagagatatagatcaatggaacagaacagagccctcagaaataacgccgcatatctacaactatctgatctttgacaaacctgagaaaaacaagcaatggggaaaggattccctatttaataaatggtgctgggaaaactggctagccatatgtagaaaggtgaaactggatcccttccttacaccttatacaaaaatcaattcaagatggattaaagacttaaacgttagacctaaaaccataaaaaccctagaagaaaacctaggcaataccattcaggacataggcatgggcaaggacttcatgtctaaaacaccaaaagcaatggcaacaaaagccaaaattgacaaatgggatctaattaaactaaagagcttctgtacagcaaaagaaactaccatcagagtgaacaggcaacctacaaaatgggagaaaatttttgcaacctactcatctgacaaagggctaatatccagaatctacaatgaactcaaataaatttacaagaaaaaaacaaacaaccccatcaaaaagtgggcaaaggacatgaacagacacttctcaaaagaagacatttatgcagccaaaaaacacatgaaaaaatgctcataatcactggccatcagagaaatgcaaatcaaaaccacaatgagataccatctcacaccagttaaagtggcgatcattaaaaagtcaggaaacaacaggtgctggagaggatgtggagaaataggaacacttttacactgttggtgggactgtaaactagttcaaccattgtggaagtcagtgtggcgattcctcagggatctagaactagaaataccatttgacccagccatcccattactgggtatatacccaaaggactataaatcatgctgctataaagacacatgcacacgtatgtttattgtggcactgttcacaatagcaaagacttggaaccaacccaagtgtccaacaatgatagactggattaagaaaatgtggcgcatatacaccatggaatactatgcagccataaaaaatgatgagttcatgtcctttgtagggacatggatgaaattggaaatcatcattctcagtaaactatcgcaagcacaaaaagccaaacaccgcatattctcactcataggtggcaattgaacaatgagaacacatggacacaggaagggaaacatcacactctggggactgttgtggggtggggggaggggggagggatagcattgggagatatacctaatgctagatgacgagttagtgggtgcagcgcaccagtgtggcacatgtatacctatgtaactaacctgcacaatgtgcacatgtaccctaaaacttaaagtataataataaaagaaaaaaaaaactctgacacaataaatattatatattatctattttataagtctgggaaaactgagaaaccataatattagtgacatttcagaggttacacagttagctaatagcagggaaagcaagatcatgcacttctttgggctagtggcaactattatgtaccaatgttactctgcttttaccagttttcttttgggcygacctacttttagtgaaataactgcatagatatcacagataactcctccgttgtctctaattcatttaaagaacatgtaacaatatgtacatggtggtattatttttttaaacacctttttttttttttttttgagccagggacttgcgctgttgcccaggctggagggcagtgttatgatcccggctcactgcagccttgaccatctgggctgaagcgattctctcacctcagcctcctgactagctggaactacaaaaatgtgctatcatgtttggctaatttaaaataatttttttgtagagacggaggtctcactgttgttgcccaggctggtctcaaactcctgtgstcaagcaattctcccgcattggcctcccaaagtgctgggattacaggtgtaatcccaacagtttgcagtcttacatttagatggatttttgcttttacattaaaaatcttgtgtgcctattaagaatgtaaaactcaattggatttgagtctcatcttttttatttgtggaataagaatcattcctttatatatgtcggcattgtgttttactgtaatgttctagtggtgttcttgtttgaatcacagttcaagtaatgccaagaactgtgatttcaacatcttctcagcaacattactctgtgcggagatgattcttccccttacatcgtttgctggtttgtttgtttgtttatttatttattgagatggagtcttgctctgtcgcccaggctggagtgcagtggcaccatctcagctcactgcaacctccgcctcccgggttcaagcaattctcttgtttcagcctcccaggtagctgggattacaggcacatgccactttgcccggctaatttctgtatttttagtagagatggagtttcaccatgttggccaggctggtctcaaacttctgacctcaagtgatcckcccgccytggcctcccaaagtgctgggattacaggcctgagccactgtgcccggcccccttccactgttttactttatcccctgtgtccctctcttttgagtgtgtgagtgctttaaagtcctataattttgttttatttctttttaaattatctctttctctcataagcttgtgtacattttcttagttacattttagtttgggatcagaaaaaaccaccacatactactgccagttgacctcctgagtgtgaagttgcacatatgcttctttttgtctctatcactttctaacctaacaatgtgttgtagaaactrgaaactagaaagtgagtttttctttcagtatgtagagtgttactgatttacttttttcaggttgtctcattgcttcctttccatatgtttcctttctagattgcatatacatttcaaggaactgacttatttggtactgatgttgagactattgattttactcacagtactcccagagtcattcccttcttctggaccctgattactcaggcagtggttakaaaagtgcattttcagatasttttgttattttccttyacttatcaccagtgacttgcatttatttacttgagttttttacattcatgatcaagcaggctttaaggccctgtgccagaagttgtcaaattttcttggttcacagtgtctttagtgtgtcagtaattttttcacagtgactttggtccaaaagaaatacctaacagtttactttactacatggttgggataaaaaaaaacttcaatatttatatactaataacttagtagctctttgaagaaataatacagatatattgaagccaaaagcactactttaattttattcttaaataatcacaattattaatgagatgtgtgtgcttcttgagcactgcacacttttcagacactgcaaacagattgaatgttgctgtcctcatttcctgttccacatggattttagcatagttgctttttatcacaggaaccactgaaaacccagctttgcaaagatgtgatgtcatagagatgaatgtggtgtgatgtaatgttgaaaccgtaaactgatttgtgtttgcggttcactaagtgatcaacaaatgtcatgtgttactatttctcttaaaaagttaagatatcccmcagtacttctgtgacttctttatggtgtcttggggtgccttgatacacaatttgggacatatagcccttagtactcttttcttgtctaccttgacaccacattttctggtgtacatcaagtgtttggaagatggtaggttttggttggtttctattgtccttaggcaaatgtctgattcatggaagttgggacaaaaaaagaacatatatacaatctgctgttcygaaataagacattttaaagtgtaatactttgtttagttatgtcttgccatgcttattgctttcctcttgaatgaattctgatgactgtaagacactgaaatgggcttgtcagagccatagttcaaaaccttaatctccttccttttgtttttaatgtgtggaactcatcttagacatctgctctaagaaaaacaattagagaaattatgatgcagtggtctcatcctgcatgttattttgcaacttggctagctcctgcgcttttaagtttcagtagcttaatagtcttatttcaaggtaaacactgtgaggcaagtgtagcttaagtttcttgtcattagtttgactgagtcaccttgctctgattcaccactgcagacaaccaaatagggaataagaattcagtgggtggatgcaaggggcaacatctgctttgccagcattctactcactgaatatctatttgtagaattcaggtactacattaaaaaaaacaaaaacaaaaacaaaaacaaaacaggtaaagcctgggaatataaaaaacatctcctttagagaaagttttgatacattgcaattctgttttgacttggctggaatttttcttgcttaaaaaaattggtttaatcctccctagagtgttaagtgctaagtcaatattttgctaattatgcagaaggagcaccagatggtttctgaggatgacactcyatgggtgggagcactgatgactgaaactgtggtaaactttgtagctctgtaatcatcctcatctatagaatacatccatgtgcttttgaaacagaagaacaaacaattaaacaatatttttaaggtaaaaaatacttttccctccaaagagtgagtttaggttgcttgtaaactgtcattcagtaagaagtcgtcaattagaatgaagctcctcttttaactatcagagaaatatgtttatatatatttccttggaaacttagttttttcgtcttagtatccttcccttttccccaacgataatttcaaattgcaagctgattttttttattcaacaagatcaggttattgagataaaaaatgttgggggttttattatatttgccttcagttagcctgcaagaaggattggttgctctcctctatcacccactccccaatcagtttacccacatggaaaatggagaataaaaattaattrctatgctagaaatgtctctgtaatggactccaaatctaaagcaatgatggtaccaatctccaggatgtacatataacaacaattatgacaatgtagtaagctcagcataacctacctttcagcgtatcttattggaagcaagagccagggtattaataatcataatttaacataaaaagatggattattttaaaaatagactttgataagtaaattgatatactatacaatgaaatatttctttttaccaaataggttaactaaattgcccttgctttaaaaatgtggtgtaatcaaaatttattgaagactctatactaaggtagtgcatagatttataaaaggaaaaagaaaataacccttaagaggctttgtaatctgaagaaatgatactgaaacaatttaagagttgccccattcatgtaggccaggatcagatgctgaattaatacaagttgaagggaaaaaaaatagggcggtatagaattaagatwaataggccattgactccaactagttcagaatgataaacttttcttgatttgaaaaaggaagtaaatgagtaaaactacctgtatgtttaaatgtaaattcaggagcttgtattctttgaagtgcacaaacaaatggggtggaatcatgatgcaatgtaccaatttgtgaattaacagtttctgaattttgagagtggcaaccttttccttcctcagacgtcattcatttctgtttgttttgatatgacattagattggtaaatctttcacatgcttcattatatagaaatgaggtctgtagatattgaattatcttaaaagacagatataagattaactgaaatgaaagagatattcgtaaaagccacgataaagttagatttcaagagcattaaaatgaaatgtccagtaaaaatgatatctagagtgttgttatgtttattgagttgtgtttacagagaaaggagttaagctgaaataatctgcttgattcaacctattttatagcaaccattttacttttgcataaatggataaatattcccaaagtgtatgtttgccagaaagtgggcaaagttagctggaagaaagagctgtttattgctcaatatgcccgattaaaataaaatttaaaaactattaaaaatttaaaaagggagtatattttctgtggacctgtctgggcataatcatgactcgttctcctgtcatttgtatgaacttattctatagtgtttactctggtatttattagcacagtactaaaatacctttcatctttttttgtccaacaatattttgtagtatatttgaaaaacagcatgttatattaaaggtgtttccattatgcttagaccaccatcccagaaatatcaatcccaacactttatttttagatttagtcagttgtactgactcgagggaaatgtaaaagatgcttgcaattaatatactgtgcatattgtagcataaatagcattaactgtgcatagtataaatatcttaaaaataaagctttgccagataacctttatatcattattaagaaggttaaataatatgtgtcaagatctgtgaggacttctctgaaatttatttctgaaataaatttatttaattgaatatatatggtataaatatataaattcaattaaataaatgcaattaaataaatacacatatatggtaaacatttctaaaggtacaaaaggtatagagtaaaaaacaggtckcctgtttatttcctgcaagttcctcagttctcaggttctctccctggaagccatgtctattaccagtttttaatgtatttatcaaaatatgttctgtgaaattttttctttttatttaattgttatgtctttattggtacatatttgcatatatttatggagtatacatgttattttcttataagcctagagtgtataatgatcatgtcggggtatttaggactcatcactttaagtatttrtcatttctatgtgttgggaacatttcaagtcctctcttccagctattttgatataatacattgttgttaatgatagtcatcctactctgctattgaacatagaacttttcccttctatctaactataggtttgtactcattaaccaacctttcctcatctcccaccctcctacccacacatcattcctaacctcgggtctatactmtctctccatgatcatgaccacattttttttttacctctcatgtatgcgggagaacatgcagtatttttctttctgtgcctggcttatctcacttaacataatgacctccagttccacccatgttgcagaaaatgacatgatttattttgtttatggccaaatagtattccattgtgtatatagaccatattttctgacactgaggttgattttatgactttgctacagtgaatagtgctgcagtaaacatggaggtgtaggtatctctttgatatactgatttcctttcctttggataaatacctagtagctggattgctggatgctatggtagttctgttttttgctttttgagaactctccagttagaaaagttttcttttctccacatcctcctcactggcatctgttatttttttgtctttttagtagtagccattctagctgcagtaagatgatatttcattgtgattttgatttgtattttcttgatgattagtgatgttgaacattttttcatgtctgttggctgattttatgttttcttttgagaatttattatttatgtattcatgtcctttgcctactttttaatagaattagttgtccttttttttaatagttgagttgttttagtttcttgtaaattctggatgttggtccattgtcagattactagtttacaaatattttctcccattccacgtattgtctcttcactctgttcattgtttcctttgctgtgcagaagctttttggtgtagtatagtcacttttgtctatttttgttttcatttccattgcttttgaagtcttagccataaaatctttgcctagacctatgtcttgaagtatttctcctagtagttttatagtttcaggtctatgtttaagtctttaattcatcttgagttgattttagtctcatttcattcttttgcatatggatatccaattttcccagcatcatttctagaagagggtgtcttttccccaatgtatgttcttggcacctttgtcaaaaatcagttggctgtaaatatgtgggtttatttctgggttctctgtattgttccatttgtctatgtctgttttgatatcaataccatgttgttctgttttatatagccttgtaatgtattttgaagtcagatagcattatgccttgagcttttttctttttgcttagtattggtttggctatttgggccctttttttagtttcataaaaatwttaggagtgtttccttctatttctgtgaaaaaatgacattggtattttgatagggattgcattgactctacaggttgctttggttagtatggttattgtattagtcttttcttatacagctgtaaagaaatacctgaaattgggaaatctacaaagaaaagagatttaatcaggtcacaggtttgcaggctatacaggcttctgcttctggggaggcttcaggaagcttacaatcatggtggaagggcaaaggggaagcaggcacatctccacatggctgtcaggaggaagagtgagtaagaagggagaggtgctacacacttttattttattgtatttattattattattatttttgagacagagtttctctccgttatcttggctggagtgcaatggtatgatcttggctcattgcaacctctgccttcttggctcaagtgattctcatgccccagcctcctgagtagctgggattacaggtattcgccaccatgcctggctactttttgtatttttagtagagacagggtttcaccatgttgaccaggctggtcttgaactcctgacctcaagtgatctgcccgccttggcctcccaaagttctgggattatgggtgtgagctaccatgcctggctgtgttacacacttttaaacaagcagatctcaggagaactctaccacaagaacatcaagggggaaatccatccccatgatttagtcatctcccaccagctccctcctccaacactggggagtacaattcgacatgagatttggttgggggcacagaaccaaaccatatcatcctgcccttggcccctgccaaatctcatgtccttctcacattttaaaacacaatcatgccttcttagcagtaccccaagtcttaactcatttcagcattaactcaaaactccaggtccaaagtctgatctgagacaaggcaagtcccttccacctatgagcctgtaaaataagaaacaagttagttacttccaagatacaatgggggtataggcattggggaaatactccctttccaaaagggagaaattggcaaaaacaaagggccccatgcaagtctgaaacccagcagagcagtcattaaaccttaaagctccaaaataatctccttcaactccttgtctctcattcaggccacagtgatgcgatgggtaggctcccaagaccttgggcagctccacccctgtggtgcaggatatagcccctgtagctgctttgatggactggtgttgagtgcctgtggcttttccaggtgcacaatgcaagttgttggtggatctaccattctagggtctagagtacagtggcccccttctcacatctctactaggccatgccccagcagggactctgtgtggggcttccaaccctacattttgcatccatgctgccctagtagaggttctccatgaatgctctgaacctgcagcatacttctgcctggacatccagttgtttccatacatcctctgaaatccaggcagaggctcccaagcctcaactcttgccctctgcccacctgcaggcttaacaccttggtggctcccagcttgcaccctctgaagcagtggtctgagatgtatctggagcctttttagccatggctggagctggagctggggcagctgggatgccatgtcctgaggctgcatagagcagtcggggccctgagtatggctcacagaaccatttttcccttctaggcatccaggtgtttgatggtagaggctgccatgaaggtctctaaaatgccttggagacatttttcccattgtcttggctgttaacattcagatcctcttaacttatgcaaattcctgcagctggcttgaattcctccccaggaaatgttttttttcttttctaccacatggccaggctgcaaatttttcaaacttttccactttgcttccattttaaatataaattccagtttcagattatgtctttgctcatgartataaacatatgccgttggaagcagccaggcyacatcttgaatgctttgctgcttagaattttcttctgccagataccctaagtcatctctctcaagttcaaagttcaggcaggggcaaaatgccaccagtctctttgctaaagcatagcaagagtgacctttgctccagttcccaataagttcctcatctccatctgagaccacctcagcctggacttcactgtccatatgactatcagcattttggccacaaccattcaacaagtctctagaaagttccaaatgttccctcatctttctaccttcctctgagccctccaaactgttgcaacctttgcccattccccagttctgcagctgcttccacattttcaagtatctttatagaaatgtcccacttttcctttttgcaaatttctatattagtttattctctaattgctgtaaagaaatacctgaaactgggtaataaagatgtttaattggctcatggtttctgtgggctgtacaggattttgcttctggggaggtctcaggaaacttataattatggtggaaagtgaaggggaagcaggaacatcttcccatggccagcaggagccagtggaggtgctacacacttttaaacaagtagatctggggagaactctattacaagaacagcatggggacatctgcttccatgattcagttgcctcccaccaggccttttctccaacattggggattaggattcaacatgagattttgggcggggggcaggggacgcagagccaaaccatatctgttattttaacaatattaatttttccagtccatgagcatgggatgtctttctatttttttgtgtcctcttcattttttttttccatcagtggtttacagttttccttgtagaggtctttatccttgattaaatttatttcgaagtttttttttgtagctattgtaaataggattgccctcttgatttctttctcagctaatttattattggtgcatagaattacttcagatttttatatgtattttgtatcctgaaacttcactgaacttgttggtcagatgtaagagtttttggtggagtcttaagatttttctagatataagattatgtcctctgcaaagagggacaatttgacttcttttccaatttgtatgccttttattcctttttcttgcctaattgttctggctaggactttcagtattatgttgaataggagtggtgaaaagtaggcattcttgtcttgttctagttattagaggaaastcctatagatctattcatatttgctttatatatttgggggctctggtattgagtgcatgtaagcttatttatttatttatttatttatttatttatttatttatttttgagatggagtttcactctgttgcccaggctggagtgcagtggtgcaatctcagctcactgcaagctcygcctcctgggttcatgcaattctcctgcctcaacctcccgagtagctgggactacaggcacccaccaccatgcctggctaatttttgtatttttagtacagacggagtttcaccttgttagccaggatggtttcaatctcctgacctcgtgatctgcccaccttggcctcccaaagtgctgggattacaggggtgagccaccgtgcccaaccgataaatttagaattcttacatcctcttgctgagttgttccctttatcattatataatgacattttcatctctttttacttactgtttttgacataaagtctgtgttatctgacataagtatagctactcctgctgacttttggtattcctttgtgtggaatatcttttccattcctttactttcagtcgctctgtgtcttcacaggtgacatgagtttcctgtagacagcatatacttgggctatattttgtattcattcaaccagtctatatatttttagtagaaagtttaatccttttacattaaaggttattattgatatgtgaaggcttattcctgtcattttatgaattgatttctgtttgctttgcctacaatttgttcctttctttctctcttatttaacattgtggtttggtaattttctgtagtggtaacatttgaattctttctcttatttatgtgtttgctctaccagttttatactttcatgttttttttttttcatgrtggtagatgttgtcttatcacttccaggggtagaactccataagcatttcttgtagagcttgtcctgtggtgatgaattccctcagtttttgcttatctagaaaagactttatttctctttcatttatgaaggataactttgctgggtattgtatatttagtggcagttttatttttctcttaacattttgaatatattatcccattctgtcctggcctgtaagatttctgctgataaatctgctattagtttgacgggggtgcttttctaagttactgggcacttttctcttgctgttttaattctctctttaacttttgacagtttgactataatgtaccrtggagaagacctttttaacttgcatctctctggggatctctgagcttctcatatctggatgtctaattctcttgctagatgtggggagtttttagctatgaattggttaaataggttttctatcctgtttgttttcttgtcaccttctgagacactgaaaatttgaatattaggtcactttatggtgtcccacagatcacatagtcttccttcattcttaaaagttctttttktctttattttaatctgacttkgttatttcaaaagacctgccttcaagttctgaaatttgttcttctacttgatatagtgtatgatcgaagctttcaaatgtattttttatttcatttaatgaattcctcagttacagaatttttttaatgatatttatctctttggcaaatttctcatttctctcctgaattgtttttctggatttttttttattattatacttaaattttagggtacatgttaacaacgtgcaggtttgttacatatgtatacatgtgtcatgttggtgtgctgcacccattaactcatcatttaacattaggtatatctcctaatgctatccctccccactccctccaccccacaacaggcccagtgtgtgatgttccacttcctgtgtccatgtgttctcattgttcaattcccacctatgagtgagaacatgtggtgtttggttttttgtccttgcagtagtttgctgagaatgatggtttccagcctcatccatgtccctacaaaggacatgaactcatcattttttatggctgcatagtattccatggtatatatgtgccacattttcttaatccagtctatcattgttggacattaggcttggttccaagtctttgctattgtgaatagtgccgcaataaacatacgtgtgcatgtgtctttatagcagcatgttttataatcctttgggtatatacccagtaacgggatggctgggtcaaatggtatttctagttctagatccctgaggaatcgccacactgacttccacaatggttgaactagtttacagtcccamcaacagtgtaaaagtgtttctatttctgcacatcctctccagcacctgttgtttcctgacttttcaatgattgccattctaactggtgtaagatggtatctcattgtggttttgatttgcatttctctgatggccagtgatgatgagcatttgttcatgtgtcttttggctgcataaatgtcttcttttgagaagtgtctgttcatatcctttgcccaattttttgatggggttgtttgtttttttcttgtaaatttgtttgagttctttctagatcctggatattagccctttgtcagatgagtagattgcaaaaattttctcccattctgtaggttgcctgttcactctgatgataatttcttttgctgtgcagaagctctttagtttaattagatcccatttgtcaattttggcttttgttgccattgcatttggtgttttagacacgaagttcttgcccatgcctatgtcctgaatggtattgcctaggttttcttctagggtttttatggttttaggtctaacatttaagtctttaatccatcttgaattaatttttatataaggtrtaaggaagggatccagtttaagctttctacatatggctagccagttttcccagcaccatttattaaatagggaatcctttccccatttcctatttttgtcaggtttgtcaaagatcagatagttgtagatatgtggcattatttctgagagctctgttctgttccattggtctatatctctgttttggtaccagtaccatgctgttttggttactgtagccttgtggtatagtttgaagtcaggtagcgtggtgcttccatctttgttcttttggcttaggattgacttggcaatgtgggctcttttttggttccatatgaactttaaagtagttttttccaattctgtgaagaaagtccttggtagcttgatggggatagcattgaatctataaattaccttgggcagtatggccattttcacaatattgattcttcctacccatgagcatggaatgttcttccatttgtttgtatcctcttttatttcattgagcagtggattgtggttctccttgatgaggtccttcacatccctcgtgagttggattcctagatatttcattctctttgaagcaattgtgaatgggagttcactcatggtttggctctctgtttgtttgttattggtatataagaatgcttgtgatttttgcacattgattttgtatcctgagactttgctgaagttgcttatcagctaaggagactttgggcttagaagatggggtttctagatatacaatcatgtcatctgcaaacagggacaatctgacttcctcttttcctaattgaataccctttatttccttctcctgcctgattgccctggctagaacttccaacactacgttgaataggagtggtgggagagggcatccctgtcttgtgccagttttcgaagggaatgcttccagtttttgcctattcactatgatattggctgtgggtttctcatagatagctcttattattttgagatatgtcccatgaataccctaatttattgagagtttttagcatgaagagttgctgaattttgtcaaaggccttttctgcatctattgaggtaatcatttggtttttgtcattggttctgtttatatgctggattccgtttattgatttgcgcatgttgaaccagccttgcatcccagggatgaagcccacttgatcatggtggataagctttttgatgtgctgctggatttggttttccagtattttattcaggatttttgcattgatgttcatcagggatattggtctaaaattctctttttttgttgtgtctctgccaggctttggtatcaggatgatgctggcctcataaaatgagttagggaggattccctctttttctattgattggaatagtttcagaaggaatggtaccagttcctccttgtacctctagtagaattcggctgtgactccgtctggycctggactttttttggttggtaagctattaattattgcctcaatttcagagcctgttattggtctattcagagattcaacttcttcctggtttagtgttgggagggtgtatgtgtcgaggaatttatccatttcttctagattttctagtttatttgcatagaggtgttgatagtattctctgatggtagtttgtatttctgtgggatcggtggtgatattccttttatcgttttttattgcgtctatttgattcttctctmttttcttctttattagtcttgctaacagtttatcaatttcgttgatcttttcaaaaaaccagctcctggattcattgattttttgaagggttgtttggtgtctcaatctctttcagttctgctctgatcttagttatttcttgccttctgctagcttttgaatgtgttttctcttgcttccctagttcttttaattgtgatgttagggtgttaattttagatctttcctgctttctcttgtgggcatttagtgctataaatttccctctacacactgctttgaatgtgtcccagagattctggtatgttgtgtctttgttctcgttggtttcaaagracatctttatttcaaccttcgtttcgktatgtacccagtagtcattcaggagcaggttgttcagtttccatgtggttgagtggttttgagtgagtttcttaatcctgagttctagtttgattgcactgtggtctgagagacagtttgttataatttctgttcttttacatttgctgcggagtgctttacttccaactatgtggtcarttttggaataggtgtgagtggtgctgaaaagcatgtatattctgttgatttggggtggagagttctgtagatgtctattaagtctgcttggtgcagagctgagttcaattcctggatgtgcttgttaactttctgtctcgttgatctgtctaatgttgacagtggggtgttaaaatctcccattattattgtgtgggagtctaagtttctttgtaggtctctaaggacttgctttatgaatctgggtgctcctttattgtgtgcatatatatttaggatagttagctctttttgttgaattgatccttttaccattatgtaatggccttctttgtctcttttgatctttgttggtttaaagtctgttttatcagagactgggattgcaactgctgcctttttttgttttccatttgtttggtagatcttcctccatccctttattttgagcctatgtgtgtctctgcacgtgagatgggtttcctgaatacagcacactgatgggtcttgactctttatccaatttgccagtctgtgtcttttaattggagcatttagcccatttacacttaaggttaatattgttatgtgtgaatttgatcctttccttatgatgttagctggttattttgcttgttagttgatgcagtttcatcctagcctcgatggtctttacaatttggcatgtttttgcagtggctggtaccggttgttcctttccatgtttagtgcttccttcaggagctcttttagggcaggcctggtggtgacaaaatctctcagcatttgcttctctgtaaattctcyttcacttatgaagcttagtttggctggatatgaaattgtaggttgaaaattcttttcttcaagaatgttgaatattggcccccactgtcttctggcttgtagagtttctgccaagagatcagctgttagtctgatgggcttccctttgtgggtaacccgacctttctctctggcttcscttaatattttttccttcatttcaactttggtgaatctgacagttatgtgtcttggagttgctcttctsgaggagtatctttgtggcattcwctgtatttcctgaatgtgaatgttggcctgccttgctagattggagaagttctcctggataatatcctgcagagtgttttccaacttggttcccttctccccgtcactttcaggtacaygaatcagacgtagatttggtcttttcacatagtcccatatttcttggaggctttgttcatttgtttttattcttttttctctaaacttctcttctcrcttcatttcattcatttcatcttscatcactgattccctttcttccagttgatcaaatcggctacttaggcttgtgcattcgtcacgtagttctcatgycgtggttttcagctctgtcaggtcctttaaggacttctgtgcattggttattctagttagccattcatctaattttttttcaaggtttttaacttctttgccatgggtttgaacttcctcctttatctcggagtagtttgattgtctgaagccttcttctctcaacttatcaaagtcattctctgtccagctttgttccgttgctggtgaggacctgcattcctttggaggaggagaggcattctgatttttagagattccagtttttctgctctgttttttccccatctttgtggtttagtataccttttgtctttgacgatggtgacatacagatggggttttggtgtggatgtcctttctgtgtgttagttttccttctaacagttaggaccctcatctgcaggtctgttggagtttgctggaggtccactctagtccctgtttgcctgggtatcagcaacagaggctgcagaacagcggatattggtgaacagcaaatgttgctgcctgatcgttcctctggaagttttgtctcagaggagtacccagccgtttgaggtgtcagtctgcccctactgggggtgcctcccagttaggctactcgcgtgtcagagacccagtttaggaggcagtctgtccgttctcagatctccagctgtgtgctgggagaaccactactctcttcaaagctgtcagacagggacatttaagtctgcagaggtttctgctgccttttgtctggctatgcactctccccagaggtggagtctatagaggcaggcaggcctccttgacctgcggtgggctccacccagtttgagcttcccagtggctttgtttacctactcaagcctcagcagtggtgtgtgcccctcccccagccttgctgcagccttgcagtttgatctcagactgctgtgctagcaatgagagaggctctgtgggcgtaggaccctctgatccaggcacgggatacaatctcctggtgtgccgtttgctaagaccattggaaaagcgcagtattagggtgggagtgacccaattttccaggtgttgtctgtcacccctttctttgactaggaaagggaattccctgaccccttgcacttcccgggtgaggcgatgccttgccctgctttggctcatgctyggtgcattgcacccactgtcctgcacccactttccgaaactccccagtgagatgaacctggtacctcagttggaaatgcagaaatcacccatcttctgcgtttctcacgctgggagctgtagactggagctgttcctattcagccatgttggctccaccctctgtttttttttttaatccatgttctcttgtgtctcattgatcttctgtaatatcattattttgaattatttttctgggatttcataagttttttttcattgaaatatattgctggagaattattgttttccattggacctgtcatatttccttgctttttcatgtttctatatctttgcattgatatctgcacatctggtttaataattacttctaattttctgaatttacatttatagcagaggactcttccttgaagctctgtctatggggttcgttgagtagagcactttggctttgatcctgggtacatgcatttgtgtagtctctgtatgatttctttggctgtaaacagtgtcaatggtgtctgagatttcctcagtggcttargctgtggttgttagtggaggctgtggtgatattttgttggagacagggacaccagatgggccagtccttgttccccagtggttacagtagcaggctaagcatgcctgttcttgggccctagagtgtcatacattggcactggtgttagtggatctaggtgggctgattcttaggccttcaggtagcttcttgggtgtcaggagtggtaatggtggcctgagtgggtggaagggtctttgggtccctggccagtgggtgttgcatgggcaatggcagtagcagtgggggaacaaccttttggctcacaacagatctgtgcttgtgttggcagtaactatgacaggcttggtggacagtccttgaaccacaggtggcacatgggggtgggtgccagctattgtggtagtggtagattgggtaagcttgtcctcaggttcccaggaggagtacttgggagccaatggtggtggatagggcagagcaatccccaagcacccagatgatgtggcacttggtggggcagagcactgccaggtggatctgtcccaagtcccccttggtggtacatatgggcactagttttgataggtgggggcaggatgatttccaggctcatggcagaatgtttgagaggggacagcagtgactgtgctgcagccctgcttttagggattgtggaggtgctttcagtggtagcagctatagacaggtggctagggagcatgtgctttggccccaggtagtggctatgggcagggttgtctgtccttaggatggttgtaaatgaactatggccctgctgctaggaatggtgggattgttgccagtggctcatgtttcagctttggcagtggcagccagcagtagtgactggctgcaggtggagggtgtcaatggggatccagggatgtggagatgcaggggctgttgggctccaaggcaggatgcagtctggarggtgctgggctctcaaaatggcatcttgctgtagttgcttaggacttggggcagtgtgtgagaaccaatgtgagctccctcttgggagcaatattgttacgtggtctcctggcagcttcctgtgttagtctcagtgcccaccaaggttgacaagctcccctatgattaggagtgcaggagttcactgtgggaatatgaaccactgagggtctttcacttccattttccctatgttggggagtctctccaacctcccagctgatattgccaggcaggctgcttggtttccctttccttccttgccttaggtatttcctattacttccctattgaatttcagtgttctctcttaagtgatcgatttgaagggtgattattgacttcctattttggttcttctttgtgtaggaggcctaccagatgcctctagtcagcaatcttgaagcctctttgtttgtttttccttaacacaaatggtactttattatacatatttgcttttgtatatcgctttttaaaagtttcacaatacatattgaggatatatgtatcaggatgtgtagcctttctcattcattttatttattttatttttatttatttattttgagacagacttttgctttgtggcccaggctggagtgcaatggcgggatctcagctcactgcaacgtccgccttctggattcaagggattctgctgcctcagcctcctgagtagctgggactacaggcatgtgccaccatgcctggctaattttgtatttttagtggagatggggtttcaccatgttggccaggctggtcttgaactccctgacctctagtgatctgcccacctcggcctcccaaagtgctgggatacaggcatgagccacmgtgcctggcctctcatttcttgtaactgactacattatattccagtgtctgggtgtactataacatatttaacctgtcttcattartggactttttgattggttctaatattttggtgttactaacaatattgcagcgaatattcttgtatatccttctttgtgttcttgtacaaatgtctacgtaggaaaaatttctagagatggaattatgggttmaagcttatattcaatttaaattttaaataaatattatcaaattgcctttcgtagctgctgtgtcaatttgtactcctaacaataatgtttgagaacgcttatttctgtatactctggaccatacaggtgaaaactgacatctcgttgttttagtttgtatttttatcatttgaattagattgcttatattatatttaaatattaggcattcgagaaaaacttgtttttaacctttttattatagaatataatacccaaatacaaaatagaaatgtgcacaaaagaagaagttgtatcataaaatgaatatctgtgtaactaccacccaggttaagaagtagaatgtttatattacccggaagcctttcttcttcctataccaamcactactccccttcctcctccaaagggaaaaaacatcattacctttcttttatgataatcacttcttgcttttctttatagtttcacccccagagcatgcatgcttatacaacacactgttggatctgtctgttctttactttatataaatggkctttatatatccttttgtttctggatcctttcatttcatataagatttgtgagatacatttttgttatttcgtgtagcagtaatttgctcattttcattgttttatagtgttccattctatgattatatcacagtttgcccattccgctgttgacagacatttccagtttgggactaatatgaataatgcattcttgtatacttggtgtgcaagtgcctgcacctttgttgggtaaattcttagaagtagaatttctggatgataggatgtggtatttttatctatattagataatgtcaagctgttacacaaattcttctaatttacacttccactagcagagtatgagagttcctgttgtcatatactttctcccattatttatattatcagtctttatagtttaaacattctggtggatatgaagtgacatctcataatttttattttcagttccttaaatattaatgaagttaagcacattttgatgtttattggccatatggaaatcctcttttatgaatccgtttttggttccatttttctattcaatttcttgtcttcttttattgatttgtaggcgttttaatacattctgggtacagaccagtttgtagtcttagtttggattccaacaaaagtagagccttttgatgaggactagggtactgatagctttttgggagataatctgaggaagtagaagtgagggartagtgaggtttggaagaaggaaaaagcctccttcttattaaggtcacactataggcaatgggaactggattcttttagaacctctgagaagggcacagaaagccttcctgaaggaggagagtctgaagcacttactcaatgctgattaagagtttcttctagtggtgtttactcccccatctcccaaggtgagcttgtgctgggctaaacatatttccgtgggcttcagagaaggtcatgaagcagaaggtggcagaatgttcagtgattgcttgagatgagatactagcaaggccagtctgcgcttgcatgggactgtccattgcagctctggctaaaatcagaactggtccagggaactcctaagtagcagcaccaatggcatcttttctattttgtagataccttttttccacactaaaagatgccttttactctcttatggtgtcttttgacgaacagaagtgcttaatattatttatgtaatcaaataaaatttatctacttttcccgttttgggtaatgctttcaatattttgtttaaaaaatcttttcttaccctgaattcatgaggacattcttaagctacttttttaggtagtgtattttttttgagaaggtgatgaaagatatgggtaatttctccagaaacatacaaatcattttatrtaactttaaggtgttcatggaacctttgaaggccttccatagaacccctagtactttattgatcgcaggttcggaatctctagtcattgttttacctttttaatttagacccatagactacctggaactgatctttgcattgtatgatatgagatagagagcaagttttattttgttttttcatatagatgtctaaaacatatacctgcttagtttttattcctttttctgtgctctctagtctgttccaaaggaatgtttttctcctcttgtgccagttactctgtattaattactgttgctttatagtttatcttgatatctgatagatcaagtctattctttgtgctcaagattttcttgtcttttcttagatgtttggattttcatatgaatttcaaaatgaasttactatattaggcacacasacacagacacacgcacaccacacacacacacacacacayagactgttggaattcagattggaattgcactgaatctccagattaatttggggagattgacttctttataattttgagtcttccaatccatgacatagtgtagctgtccacttgctgggccttaacttattctcaaaaatgttacatagtttattgcaatgaggccttgcatatctttcattacaagtcttacctaggtatttgatatttgtgatagttttatataaatgatatttataaatttcattttgcctgggattatatgtagaaaagcaatatatagtttttgtacaatgctcttgcataaaacaaaattgccaagcccatttgttaatagtaattcttcatctgtaggttcttttgaattttctttctatataatcatatcatctacaaattctgacaatttgatttcttcttttaaatttttatattttgcatgtatttttcttgtctaattgtactgtctaatacttccaatgcaatgttgaaaatagaagtagtgggcatctttgttgcattctgtatctcaaagaaaatgctgttgacattttattaataagaatcatggtatgatgtttgcttaaaaatactgttttttgtgcacttgttgcagttgttgggtgtaccattataaatatgtcaattaggtcaaatttgttgatgatattaattaagtcttttatatttttctgcctttaaaagtctacttattttatcatttatccagagaatattttaaaatttttactttcagttatggacttctcttatacttctggcaagcttagctaaatattttgagaatatggcattaagtttatataaagttagaactgttatatcttattgatgaattgactttttaatcattactattactgttactattatctttatctctaataatactctttgcctttaacccttttttgtctgatattatagttttcttttggttagtgcttgcaccaaaactaaaatctatttaactcagaactttctaaacttatrtgaacatagaattttatcaaggcatagtatatattaatatctcaggaaacaagtggtatatagaacacactttgcaaaatagtgatctaaaatatatatatgattattaaaggagtatacctarggggtcatagataagagagctatttagatatctccagttggggagtctattaaagcagggttaagcaaactatatcaaaggagcccaatctggcacactacctgttcttgtaaataaaattttattggaatacagctatgcccacttatatatgtaatttctataattgcttttgctctatgatggcagagttgagtagagagaccatatggctatcaaagcttaaattgtttactatctggctttttacagaaaatttggcaattattttcctgctaataattgccaaaaattattgaacacttattactttgtgggctcaatatgttgctagatattttatgtagataatctcattttattatcctaaaaatcttttaaggtaggtgagatgagattgtgtttattttacaaatgaggaaactaaggtgcagagaaattaaataattgcccatggttacatatctagcaaatgtcagaaccagggtttgaagctagatctgcctcctagccttcactttctcagtatactagactgccttctggttcctgttgttttggtagagtgtgaagtaatggaacaaaaagttaagaaagttaaaaaactcatactttgccattgttactctaagaggttagctatgttaagtatacctgttaagtgccagggtactgtactaattgctttacatgttatctcattcaattttagcaatgaatctgtgttgcattttatagataaggaaattgaagttatttatcaaggaaaaagtagttaatctatctcagaccatactttcagaggaatattgctgatttaaagatagttagataactctattgactatgtctattatataatacagtagatacataccataaatgtttcctcatgctgttgtctaggattccaaataaaagttttaataaccacatmatgacataatattatgcctagtgagtgggctgtattttaaactttcccttatttttggatgtaggatatagaactcacattattaattagaagatttacttgcatgttaatgacaatttagaaaatactctgaatgttgctgaagattgtgacctttgcaagtgtgaactctgtataaaatagtagaactgcatacttttttttgcttaatttattttttccaatttcaaatgttcagcattaaggaaatttagaaaaatgtgaaaaatggaaagtgtttacctattgtyccatgcccaatggcagcctttgttaacagcttattcctctcagtccttttcctaagaacatagtcttttattattttttaaaaagtgtgtgaatataatttttatcccccctttttggctttacatcatgtacctagtgatggaaaactctgacttaaaatgaaagctctgtcagcaacttgtcatgtggtcctaagtgagttgtatgtctgtttccttgcctgtaaacttgggcacatttcactgtgctatccctgatatttttacttagaatgtgaggcaacctctgaggctaggccagatcttgtctggactttaaagtggaatcttcaaattgttatgaagaagatacagtaaaatgataagcaggatctctccacgtgatcctctttgtttctttgtttttgagagtgagcaaaagacctaaggtaaggttgagaaggactaacctgtagtgtgcaactaagctcctagtgggtctacagtgtttatttgttaggtgtgataatgtggtagcattactaaagtcacaactgtagggtcttgtacccttaaggcattcctctttaaaaagtggatgactatactagccaccacatcacctaagatgtgacttgagctcatttcatctgagtcttagggaaaaagcaaaaagggaaatacatttatggaaggcataccccatctaggaagcattttcatatatcaaatccccacaaaaactttgggaggtaaatgttaacatcctcatctttaaaagtatktttttttattttagaaagtgagattatatagttttacaatctgctttcttctctttacacatttcatgcaaagctgtaattatttgtcttctttactaggctgtgaactccttgaagtcaccaactctactgcattcatttttgttttctcagggcttaacacagtgcctggcacagagtaaacatccagtaagtgatgagtaaggatgatttactctaggaattgggactcttagataattagcccatagttatcaaatctttatttttcttttgtttcagcatctctcttccttttaatttctaccgtgaatttagaaatgcttgaaaaatgtaaagtgccacatacatgcaagttgagactatgttgactctctgtattcccataagttgttctggtctgtatccagttgataatgcagttgttatttttatagtagtctaagtacatatttgcacaacaggckgtgtcaactcatctaagttacttgctgttatttgcctgatacttttaaattacagagctccattactgaagtcattatttgtggttaagagggagtggtactgagagtggtaacaagaagacttttaaaaaatgaggattaaaattgaccatctttagctgcctttaaatttatcttgatttaattatctagaacaagtacaaataatggccctgccttagttttttctrtacgtctgctctatacaaaatacgctgattaaaaagaggtatggacttaaaaattagaatttatttgcaagattttgttaaatgattgctttttaaatctctgccactctactgttactccattttgtgagcagaactcaggaagagaaaactcagcaaggataggaatcctctcctctttctggatatgatagtgcactgcaaatgcaagactcttctaactatggcatctatcttacaatgaatccaaatggtcattcctggaggtctgggattatgctttgttgtcctatatccctagaaattcctattcatgccattcatcctgtgggctctcagaaatattaattgaattgctgaagacttgcttgtatctttatctcagatttttaaaaaaagcaccctgcaataactaagacttaattttttagctaaattccatgtctagtttctaatacctccttatattttaaaaaatcattattttattgttaaaaaacagaaactccaaaatcattgagaatcttttctgtaaaataagacattttacagagttacaaaattttcatttttccatacaagtttttgtgagcatgcccacatttagcacagttactctttagcccgggagtttttgaattttagtgtgctaggaattacctgaggacaatgcttaaaattagattcatgggccaattctcagtatcatagaattgattggtttgtgtggagctctaataatctttaaaattattttctttttttaaatttttattttattattattatactttaagttttagggtacatgtgcacatttaattttgagatggmgtctcgctctgtcacccaggccagagtgcagtggcgcaatcttggttcactgctgcctctgcctcccaggttcaagtgattcttctgcctcagcctcctgagtagccgggactatcatgctcggccaatctttgtatttttagtagagatggggtttcaccatgttggccaggctggtctcaaacttctgacctcaagtgattcgcccaccttggcctcccaaggtgttgggattacaggcgtgagccaccgcacccagccacaatttttttattttaataagcactctaggcatttctaatataggtagtctgtggattatgttttgataatgactttttttctccagtcctactcatacaggaccctctttgcctttttaaaaactattattaagttgttatctctgaaatcagacaggctataagaaaaaaaagatcttaaaaaagacaataataggtgttatttcaaagaagtgtattttgataagaaaagcaaggggcatgaaggaataaaggagaacaagattatgaagtgaaaagttacaaaatatattcttttttacccactgccaaatttttatttgattttggtcannnnnnnnnnnnnnnnnnnnnnnnnnnnnnnnnnnnnnnnnnnnnnnnnnnnnnnnnnnnnnnnnnnnnnnnnnnnnnnnnnnnnnnnnnnnnnnnnnnnnnnnnnnnnnnnnnnnnnnnnnnnnnnnnnnnnnnnnnnnnnnnnnnnnnnnnnnnnnnnnnnnnnnnnnnnnnnnnnnnnnnnnnnnnnnnnnnnnnnnnnnnnnnnnnnnnnnnnnnnnnnnnnnnnnnnnnnnnnnnnnnnnnnnnnnnnnnnnnnnnnnnnnnnnnnnnnnnnnnnnnnnnnnnnnnnnnnnnnnnnnnnnnnnnnnnnnnnnnnnnnnnnnnnnnnnnnnnnnnnnnnnnnnnnnnnnnnnnnnnnnnnnnnnnnnnnnnnnnnnnnnnnnnnnnnnnnnnnnnnnnnnnnnnnnnnnnnnnnnnnnnnnnnnnnnnnnnnnnnnnnnnnnnnnnnnnnnnnnnnnnnnnnnnnnnnnnnnnnnnnnnnnnnnnnnnnnnnnnnnnnnnnnnnnnnnnnnnnnnnnnnnnnnnnnnnnnnnnnnnnnnnnnnnnnnnnnnnnnnnnnnnnnnnnnnnnnnnnnnnnnnnnnnnnnnnnnnnnnnnnnnnnnnnnnnnnnnnnnnnnnnnnnnnnnnnnnnnnnnnnnnnnnnnnnnnnnnnnnnnnnnnnnnnnnncaacctctgcctccagggttcaagcgattcttctgcctcagcctcccgagtagctgggattatagccacgtgccaccatgcccagcttattttttgtatctttagtagagacagggtttcaccatgttggccaggctggtctcaaactcctgacctcatgacttgcccaccctggcctcccaaagtgctgggattacaggtgtaagccactgcacctggcagcctggctaatttttaaatttcttttgtagagacgggggtctcactttgttgtccaggccggttttgaactcctcaccttaaacgaccctcccactttggcatcccaaagtggtgggataacaggtgtgaatcactgcacctggccctcattttttttgttttgttttgtgtagacactatttttatgctgaccacctttgttcatagatagctcttattgaattattctttcaggagagcagtaaagtgttggcagttgtaaaaatgtgtcaaatttatgcaatcctatctctgatttacaattcagttacacatgttggcagaggtgaactggtgggcctaaggaaatgccacaataattcctcctctcttgacccagaaatgtcttgatcctgaccatataatttattaaagtaggcttagggtatgttacatgaaagtgtaaaggtattcttcctagtgggtgtgaatagtatacattttaaaaaaatgtaaactcctggtccactcaaggagattttggtttaggaggtctagagtggggcccagaaatttgaactttataaaagctttttaggtgattgtataatcagctaagttttggtacaacgttcaactctataagaattctttccacaacattcttggtaaagagtcatgcagtctcaactttgacaacttctatttgatgatgcaacttatttcattgctttaaaagatttatcttggactgaactaggcacggttctgggtgggagtctggggagcgcagcagccatggccagccacttcgtgctcagcaacggtgccaggatgtccatcctggggctgggcacctggaagccccctccacgccaggtgactgaggctgtgaaggtggccattgatgtcaggtactgccatctcgactgtgcccatgtgtaccagaatgagaatgaggtggaggtggccattcaggagaagctcagggagcaggtggtgaagtgcgaggagctcttcattgtcagtaagctgtggtgcatgtaccatgagaagggcctggttaaaggagcctgccagaagatgcttagtgacatgaagctggactacctggatccttaccttattcactggccaactggctttaagcctgggagggaattttccccattggatgagtcgggcaatgtggttcccagtgacaccaacattctggacacatgggcagccatggaggagctggtggatgaagggctggtgaaagctattggcatctccaacttcaaccatttccaggtggagaggatcttaaataaacctggcttaaaggataagcctgcagttaaccagattgagtgtcacctgtacctcattcaggagaagttaagtccaaaggcattgtggtgactgcctacagccscctcggctctcccgacaggccctgggccaagcccgaggaccttgcctcctggaggatcccaggatcaaggtgatcacagccaagcacaataaaactacagcccaggtcctgatctggctccccatgcagaggaacttggtggtgatccccaagtctgtgacaccagaatgcatttgctgagaacgttaaggtctttaactttgaactgagcagccaggatatgaccacctcactcaactacaacaggaactggagggtctgtgccttggtgagctgtgcctcccacaaggattaccccttccatgaagagttttgaagctgtggttgcctgcttgtccctaagtgacctatacctgtgtttcctgcctcatttttttcattgcaaatgtagtatagcctgtgtcactcagcagtgggacagcaaactgtagagtggccagcgagggtgtgtccagcttgatgttggatctgaggagccctgtcagtagaatagaggtctcttccagtttgctttgcccttctttttgccctgctggggaaagtacaacctgaatacccttttctgaccaaagggaagcaaaatctaccaggttaaagtagtgccactaacagttgagttttaactgcttgkaactgtaatcctttcagcaagacttctctttgcctcaaataaaaagtgcttttgtgaacttgaaaaaaaaaagatttatcttggactgaactaaaacctaccactttgtaatttccacccacaagtattgttctttctttgggaaggaggaaagagaaactaattttaatcagcatttactatattatacttgctgtgctaggtataattgcctcttatttgtatgcttgaaaaaactaaggtaatttccttggctgcaaaatggagtatcagagtagatcagtggttatcaaaatgtggtctgtggacactggagatccctgagaccctttcacagggtgtgttgtcaaaactattttcatcgtaatgggaaattgctagttgcttttttcactgtattgacatttgcattgaggatgcatagcaattttgggttaaaactgctggtgccttagcacacattaagacagtggcaccaaatgatattagtagtcattgaattctttattattaccactcacgaaacaaacaaacaaacaaacaaaaaggcagtttcacttaaaagcattgtagatgaaacagtaaaaattttaattttattaactcttgacccttctttaatactctgtgtgctgaaatgtgaagtatgtataaggcacttacactacatactcaagtatgatggttatcttgaggaaaatcacttataattgagttgaactaactacttttttcaaagaacaccattttttacttgaaagaacaactaacaaacacacaatggttatttagacttaaaaacttggcagacatattctcaaaaatgaacaaagtgagcctgcctattttgtagaaaacaagtgacacttttttgtcaataaaatttgagcttccaagagcaaattagtagtttgcaaagcttttacccaccaccacaatcatgatcgcttcccagtacttaaaaatgtttctgataagatagggtggtggatattaagaaacgtggttttaacaatattgcataataaaatatgtcaatgttttaaactcagtgagccaatgtttcttaaatgaactaatgtatgatgttacaaagtcatgcatggctaaaagatccatttaaaggcgatttgattttabggtaatggaatacaaaaagtttattgatattcaatttttagattccatattgcaattaacttttgagaaatgattacttgtcaaattttgatataatataaaagartagccacaattatttgaaaaggctattaaaacattctgcctctttctaactacctatctgtgtgaaaatggatacttttcacatacttccrccaaaccaacatatcacaacagattgaatgcagtagcacctatgataatctagctgtctttttctaaaccagacatttgagagatttgcaaagatgtaaagcaatgttagttttctctctcttttttttattttggaaaatatgcttgtatttcataaaataytttataatactatgtaataggtttattattgttatttaaaataactctttaaaaactttaaagttttagtttctaatatagtaagtattgataaatgtaacaatagctctttgtgaccctcaataatttttaggactgtaagggagtcctgagaccaaagagtctgagaaccactggactcaatgatctccaagttcattccaaccaccatcattgaacatgcaaccatgctattgtaacatggtttccataaagtttcctagccattctcctctgaatgctttgtcaatgtcccttctaagtgtggccctcaataccaaaataatattgaagagatataggttgagcagcatggaatacatgaataggctattatgaggtagcttcaataataactacctttggagatctttaagaataggagaaattcctatttctttgaggaaggaagttcttccagaacagcagagtggtggactaggtagcatcttaagttgtcttccttgatacctcacaaatactctaaccttttgcattagaagacataattttctattcagtactgtgatgttttaaattattaacaactgcatttaaaaaaaatactggacattagcttaatgtcagtcctactgaaagtcaaatttcacattttattatttatagttaattcaaattctgcataatttaatatgattattaaggaaaaagaaaactaagcattatggagttcaataaacatgggtttaatctagtaaagctgcaagcaaaaaaagtgataataacagtgaagaattgaaatttttaaattgatggagctttggaggaaatagcaatagttttaatgcaacaatcacatctcctgcaaaacccacttgaatttgcatacaggatatttttaatgtgtaatttttattctgatatataaaagaccaggcatcgatattttcctaaaagttagttgagaagataaatgcgttgaagacagttgttttaattcagtggctcactatgtataatattagtaaaatcaatgcatcaataaattttaaaaagttatttaattcttgacttcagttttaatcatgcagtgctatgatttaatgtaaaagtggacaaaatttgttacaggtgttttggaagcactttagttctttaaataataccttagaatcattgagtctcagggctgtaaggtcatttaatccaaccacccatttgatacttgaactttcttgctaactcacataataaaaagaaggtggggggtggttactaaaaacagaaatgggtgtggcttaaagacagacttttaagcaggatttaaaaatgtagcttgaaagcttttaaagtctaattatacagggaggtggcaatgtttttatttgctatttacctttgatctattacctatttttggtagagtgggacatgcttttgtgaaaatgtttatggtttcttcatttgatgttaagatactcatttgaagttgccctgtaattttgagggttttttaaactaatattaatatttggcttttgctcccagactaatagcaagttatcctagatctgggtcatttcttttgaatgtctaagtgatatactgaattttagaaatatcttcctcattttggcatacattagacatgctaagtataaaaaaatctaaataatatcaaaccataagggtaataaagtaaaaagaacctatggcaccctgcccaatgttaacatttttgttaaattatattttgtgaaacttatacatgcatatatatttgattttcacataagtatttgatattctataaattgatgggcttttattatacacatattttttattcaacaatatattgtggccatcttttttgtcaataaatatagatttatataatgatttttaataattacagagtagtgttatatgtatgtagcacaatttacttattcaatcaataggttattcctaattttggctattataaaaaactgtagtgaacatacatattaaatgtatcttttatcatatttataatgagctctttaagataatttttgaaagtagcgttgaaatctcaaaggatatagacagtaaaagttttaaaacttattgtaaaagtgccattcagaaaagtcatacatttataatcccatcaatagtatatgaaagtgcttatttttccacactctcaccaataccagtttttgtccagtttataaaacgttttgccaatattatgagtgaaaacattttatttacatttctttggctatttgggaggttcctaatttttaatgtatacatttttatattattggacatttgcatttcttcatttgtacatttcttctttgtatcccttgttcttttttttttttttttaagacagagtctcactccgttgcccgggttggagtgcagtaacgcaatcttggctcactgtaacctccgcctcccaggttcaagtgattctcatgtctcagcctcctgagtagctgggattacaggtgtgcaccaccacacccggctgatttttgtattcttagtagaaatagggtttcgccatgttggccaggctggtatcaaactcctggcctcaagtgatccgcctgcctcagcctcccaaagtgttgggattacaggcatgagccacccctcttggccccttgtgcattgttatattgaagtatttgtagcaatgcattttttatttagtacattaagaatatatcaaagacttgatgactaaatattatggaacaaattaccaccatggtcagatgtgtaatagactgtgacccaggttggattattgattgtttgaaatccttgatgggaaaggccattattttttttaatttaaatttttgtgttcttactgtccagtgtgatctttaacccatggtcactcttcgctgaatgtataaatgagcaaatagagaactggaacaatccatgggtgattaggcgttctgaggattcattttaccaaacagattgagattttccagaacacgtaatgatttgctctggcatttccttctctatcttttcacatttgtsctgccatcaggaccatagtgactgcttttgtttttggaaatgtctttttaagactaaacttttctagttcttaaaaaggtacctatttcaagttgtgtatatattaattcttaactctttgcccctcataaaatgttgcttgtttagccttcagttaactgcatgcagaactatgcattaaagtcatttttaaaattatataatgatgaactctttgaccataggaacttattattttttaattctttgctgtaaatttcaccaatagtgcaaatccattgataatgagattcacagttgcttttaacatatgtagcacgactggactgatatgatgaataagatttattgactttgtattggtgtatgtgaaaatattatttgttctaaatgtctggaatctgacttgttccaaaattaaaaatatttctagagttagagatcttaattcaagatagttcattgattaaaaaattaaatctatgctaaccacaatattttctggtcacattttcttttagctccccattctttatgtggaagtgaaggaataggatgtatcatgtatcttgcataattccaattaatgcttttaaaaaagtagttgccagaaaaacaaggtgtggtattttaaaatgtataagtactaaaaactctttcggattcttctagaatttagacttttggatatacagcattttgctataaaatttattttgtgggtaacttctttataaggaaattataatttataactcagcgggggatagcaygtgaggatggtttgaatcagaaccagtactctttgatggttttggataatacacacagtgtgtccaggtaggcttgtctggtgtcccagataaaattactctcccagatccctaaacagcagaggcaatgaggaagaaaagggtataataccaacaattaatgacagagctagccagactgtcctgtacttcttgcactgtggaagtaggcgttagagttgctggaaactggtgaaactggagaagccctgaggcaccatttcctacaaggacaagaaggtctagtgaagaagtctaatgggtatgttagctgttgatgcttaaagctgtccaaatgcccacacctttatcatctatcaatctttaaaaagatttaaaaaaaaactttttttagagattttttagagatgttgcctaggctggtcttgaactcctggactcaagcaatccactcgcctcagcctcccaaactgttgggattacaggcgtgagccactgcacctggctctattatctataaatcttgactagaaaatagaataaattacctggatcatttaggtaaaagcatattttaggggttgaagagggctgagttagatatttatttcatattcatcttaatttcagatgcctatacctaatctattaaggtcatttgtgctataattgcaagttgggtgcagtggttcctacaaatgatgttgatcaagatccattgtttttcagaaggattttatttaaatctagttagctgtaactaacctagatatttgctggctatatttaaaaactgcagattgaatcaagccagtccccagagcctaggaaagtttctgacctaatttaggaacccaagctctattattatttttagttgactactactcacagccatgctcacatttttgaaagaatacagcctctgtaacaaagtttctttgttttaatggaactaaaaatatgctgtatttagaccaaacaataaaaataaactaccaaaccaccttaatgcatgggggtcctggatagagaaaatcataggcatgtagaggcataaaatgactctttgtatgttaaaaatttgtataaggctagctctgtgtgtttgagttgcatctgttacctcttcagccagaactaaagtatatgtgagcaaaacaattttggattgaattatggcttatacagaatgcattgtatatagcctaagcatcttatgggttccacgccttaggtagaacaaacactgcattctttcttattaattctacctacaaggtattcctgtcaggcacatttaagatattctctgtgaagctaattcatttcaacttgcagacataaattaaatgtttttcaaatataaattataagcctgtttctttctttctcttaaaaattttttcccttttgttcttacttatttgtatttttatcacctactttattaccgatttttttaaaagagcaatattggatggaaatgtggcattcttagatgtagaaccatgaaataattgtttcttttggcattatcattttggaaaaagttgttaaagtagatggggacaactgcatgagttaaaaattgtatgatttgtagccagaaagtatacttctttaataaagcatataaatgcaatttacttatccttttttatttcattttctattaaattttcaggtcactttcatgaattcaaaggcaatttaccagtgatttctgggtgctggggctgatattttttgtgcatatttgtaagtattggtttatctttacttttctcattgtgtaatgaaacagttacagtttgtaaacaagttcttaactcctagtgcgtgtgaatttttattagtttttttgcaattgttttgtaattattattttttgataagtgttttcttaggaggagcatagagaaaagtaccagctggtaaagaagcctcaatttgttgtaatttccagtgaaataacacaatgcagggcccattataataagtttaaagaataactatcttactctttgagaatagggctcaattgtaggaatgagttatcttaaagagtctagtctatatacacgtgaataatttacactgataacttctgatagtcttctggttgtctgtacttgaaaagtgctatgtgcctatgcccatagagaagatgtgagacaatgtagaattcaaagagctgtcagcacatgaggagataatgtacaggcatacctcgttttattgcactttgttttattgtgctttgcagattttttttwaagcaaattagaggtttatggcaaccctgcattgggcaagtctatcggcaccatttttccaacagcatgtgctcacttcatgtctctctgttacattttcataattctcacaatatttcaaactgtctcattattattatgtctgttatgacgatctataattagtgatcttgatgttactattgtaattattatggggccgcaccaaacaagcccaaataaggtggcaaacttgtgtgtattgtgtgtattctgattgttccaccaactggctgttcttccatccctctccctctccttgagccaccctgttctctgaggcacaacaatattgaaattgggccaattaataaccctacaatgacttctaagtgttcaaatgaaaggaagagcagcacataaaagtctcacattaaatcaacagctacgaatgacaactttgtgagaaaggcatgttgaaagctgagacaggtcaaaagctaggcctyttgtaccagttagccaagttgtgaatgcaaagggaaagttcttgagggaaatgcaaagtgctactccagttaattatgaatgataagaaagcaaaatagccttattgctgatatggagaaagtttgagcagtctggatagaagaccaaatgagccacaacattcccttaagccaaagcataatccggagcaaggccctaactctcttcaatttttgtgaaggctgagagaagggaggaagctgcagaagaaagtttgaagctagcagagattggttcacaaggtttaaggaaaatagcagtctccttaacataaaagtgaaggtgacacagccagtgctgatggagaagctgcagcaagttatccagaagatctaggtaagaccattgatgaaggtgactacatcaaaccacagactttcagtgtagatgaaacagccttatatgggaagaagatgctatctaggactttgatagccagagaggaaaagtcagcgcctggcttcaaaggacaagtggactcttttgttagaggctaatgctgctggtgaatttaagtcgaagccaatgcttatttactattctgaaaatcttagggcctttaggaattaactctgcctgtgctctacaaatggaataaggaagcctgagtgacagcacacttgtttatagcatggtttactgagtattttaagcccactgttgagacatactactcagaaaaaaagattcccttagagatgttatttctcattgataatgcacctagccatcaagagctcagatggagatgtacatggagattattgttgtcttcatgcttgctaacagagcatccattctgtaggccatggatcaaggagtaatttcaactttcaagtcttattatttcagaagtacattttgtaaggctgtagttgccatacatagtaattctgctaattgatctgggcaacgtaaattgaaaactttctaggaaggagtcaccattctagataccattaagaatgtttgtgattcatgggggtaagtaaaaatagcaatattaagaggaatttgaaagaaatttatttcaaccctcatggatgactttgaagggatcaagacttcattggaggaggtaactgcagatgtagtagaaatagcaagagaagtggaattagaagtagaagtggagcctaaagatgtgactgaattgctgcagtctcatgatacaacttgagaagatgaggaattgcttcttcaaaatgaacaaagaaagtactttcttgagttggaaactaccctggtgaaagatgctgtaaacattgtttaaatgacaacaaaggatttagaatattacataaatgtagttgataaagcagcagcagagtttgagaggattgacccaactttgaatgatgttctgctgtgggtaaaatgctatcaaacagcattgtatgtaacagaaaaatattttgtaaagaaagagtcaatgaggcaaannnnnnnnnnnnnnnnnnnncttgaacccaggaggcggaggttgcagtgagccaagatcatgccactgcactccaacctgggcgacagagcaagattccatctcaaaaaaaaaaaaaaaggaattgtcacagcccacagccactccaaccttcagcaactaccaccctgaccagtcagcagccatcaacatcaaaacaagagcctccacccatcaaaaagattatcttgctgaaggctcaaatgatcattatgattttttagcaataaagtatttttaattaaggtatatacattgtttcttagacttcatgccattgtacacttaccagagtacagtatagtgtcaacataacttatatgcactgggaaaccaaaacgtttgcgtgatttgctttatcgcaacatttgctttattgcagtggtctggaccaaacctgcaatatcttcaaggcacgcctatactaaggcatactatactcttccccatctgcaaaacaccattatattttaaataatattttggagaacaaaggtactttttataaataaagaaggcaaatttcaagaaaaaaattgaatgaactttaaaaacctattaaagtacttgaaattaatcaatatatattatwtagaagtgctatagagtaygtagcaggtattaaaaatgtctctgtggatgtaaacctacatttaagtaacttgcatttaaaatatatgtgtatgtatacattgttgtaaactgttgrtatttaaggggcttttttacatttgataacagcaaagacacaggaaactttttctttgttagtgtactgctataaaggaattttaaagaatatacttctaggaaattatttgaaataagtaatgttataaattagagtttaagtgattctctatttaagcagagctattgaaaatttatttaataccagctttacctttcttttaataatagtattgattaggataggcattttgaaccagcttaaaaaaatagwtgttcatgtttaatatagtttaatacattttatgtatttttaatgttttaataataaattgttattttatgaaactctatcaatttacattttattatttttagatgtaagtcttatgtaaagcacaaaattatataaactgtggggtcatttggattaaacataagcctttaatttatgcaaggtattgtggtgaggattaggaagcaaagaagatggagaaagaaatataaagtatctttgaagggctctttgtgaaaacaggattctaaggaaccgaacttattctactggaaatctgagtgaagggaaataattctgagctgtccaaatcttatcttagttgctttgtctcttttttacctcctttctctcttctttcatattatttagtcattcgctttagtaagttttcaggatgagtaaagtttttaatgtgacaaatataattaccagcatttcaaaccaagatggccttcattaaaatatagtttacatttcttatcacccaaaggatctttttcctgaattcttcactttattccctccatcaagacacatttagactaactttgaatggtggtgatccaagtagctgatcactttcttttgacttaacaaagggaaaggctaaaattagaaggggcactgttgatgtcgtttctgtatggttatttctggagttccacttcaaacaaacaaacaaaaaaccaaacatcttttagtcagattttgtctggccacttaggcacatgtcatgctagtcatacaggcttaaagcaattattttctggtcttgagaatttacatatgcttgtttagggcatgggctttggtgttcctttggtcagtgatctcaggttttgctagggctgtctcctgactgcagaaccttttggttaaagaaatatagccggatactatgactaagataagtcagatgaaattaacatggcatccaaaattcctgagtttctagttctctcatttgttgtggaaaytgttcaaccacttagactgaaagatgaggcttctaaaacgatagaaatatttgtctagtcaggcctaagaacaggcaaatgggttcagtgacaattacttcttttatgaaccttaatttccatgtcctacaactgcttatttgctacatgatctaaggcagaaagttatacctcatggccatgggaagrtttcttagtaaggtgtgcaabtctgtgagataaggaaggtgggatattgttttgcacatccataatgaatgggctacaccaaaagtgtgtgagaactgactggaatcttagctactcaaatcaactacctaggccggaagaggaaaacactgtgaaggaaaatggctgtctcttcagaagctgcatcttattctagtgttttttttctcttaaaaaagtaaaacttcctttttttcttttcctaaagtaagcattgtggaagattgccttattttgcatgttcttatctcacatttgattttttcttatctctaatgaaaaataattatgtaattctgaccgtttaattttaccagagcagtaaatgatkggttaaaaaaaaaacaaaaaaaaaatcggacatagtttattagctaccctgctttttcaggttacccaagtctttttagtaatttgataatgaattcctttaaaaaattctatcttgactcatggtctctaatagcaatctttttcctgatgtttctgacaaggattttattgtgtggtacaaaaagtgattattgcctaactctaggcttgaggcaataataataccaacagaatattaagatagtataacacttgattctgcagacatttaattggctgaatttcatgaaaactctgtggaatgagtaggaattatctttatttttgcagagtagcaggattcaaaccttgaattcatggtataaatttagtgctcctttcacaacaccgtgctttcctctttcagagagaatttcagctctcttttgtttttgatcactatctcagtcttcacttggttgctgtataaatatttttgaaattttgagatagactaagtcggggaggagattgtagagacgcttctaccactkacttcatttcctcaggttcctggaccatttggtcctccctgatattttcctactcctctattccaaaattgccacatgtcatgcttcagctgaaattttttgaattacatagatttttagggaagcaaacaaacaaaaatcacaaaatcatgtctttgtggcattttaaaatggaaagaaatctgtttaaaactgagcatagcccagaccaaagatccctcagtgagaatatctgtgattttaaggacaagtaggtctaagtgcgttatctttaaaaaatattattccaggctaatcttgacatagagcaggtaaataaaaaagatgagctgtgaaaatccacaaatagggcttgaatgccattttccatgacaacgggagctgccccatgaaagcattaatgctgggaatgtaaggaatttaaaattgtgccttctcagttttacagttgtgtgctcatgttaattagagatatactgacatttgaagtatctacattaatacacacagctactatacatttgtgaaatgtggccagaaatctactttaattgaaaggagtttgctaatctgaatgtgtatacccattacattttaagcttttaaattttatatactaggtcccttagatacttgttctttttgccctctctactttctgtttctaatttatacctgaaaggacagcctggcctatttttaatctcttagtggtgttttggagctgtattgatggaattttgagaaaaaaatatttttaatagtgctttttatttgctgtagttttgaatctttttttccctctctgactttctgaattactgttttttcttgcaaacctttaaaatggcctgccaccaaaataaggtaggatttaggtgtatgaaatttgcttcactgactgtrtttaaggacaaaaatgctactctttattgtcatactatggttttagtcagaaaagcccattgttggagaccttaatggaataaacagtgaagaggaattctggtttttccagtatagctgagttttatctttcagtcttcatgttaagccatgtgtcttaatttttgatttgcaaataggttcacaatagcttgatgactttttgaggtcatctttaaccctagaatttttgctttgtctgtcttaacatttaaagtaagaccttacatctcttttttgcaagcttgtatttcttaagaatctgtcagagtttttaacctaattgttttgtgcttgttgtctaatgaaactcctgcacttactttttggaccagtccctgaatattgcacaaggccagttagaaagaggcttcgtttttgtagcaccagaacaaactgctctaaaaagtttgttaatactctggacttgtttcattaaaccattttactggcactattaaaccactgagacctgggaccattaaaatttactcagttactattattattattatggcctattttacactttattacttttttttttttcgctgtaccaagttcctctgttctttattcttccatgttgcttactacatattgtgccaccacagcacatttggtaatttcaagttaattgctcaattatcagtgatagtcatgaagcatttgaaacatgcgcggtggaacattttcaaaatttcaaaataagttggtgtgtcataatcttaaatgtgaaacatgccaatatctgcaggcataaaaatacacagcctgagctaggcatttcaggaaggcaaaaacctactcttaaaatcagggcttttgtctggcactgaagtgtttcatcttcgctaatttcaaacaacatgtctaaatttgatcttggtttacttttcaactctaaaaatttggttgtagtttataaaggaaaatggaagtaaaactgtattgattctgtctgaatgttttaccatgacctcataatcctgtattcactataatgtggaattggtgtgaggtggatccatgttgggtgccgatcaaagaagctgacttattaaagaagcagaactcataaggcaatcttctaatcagaggacagtgttacagtgaagatcgtatattgatgatttattgatactgaaaaacaaacccacaagaacaatgacactttgaggacttactctgaatcctacacactagtattttcagatgcctgcaaaacaacttacacattatagcaaaataattattgtaactcttttggcaactaggcaaactatcattaaatttttgcattagtattcagtttagggttttctccaaagtaatatagtgcaaacagctcttttttttaagatgctgttatagttctttcacatttttatagtactgtagttaaagttgaatttactggatacatttgaaggtggagtagagttgcacaagagtcaacattaaagtgattcagtgcccgatggagaaaacttctttttaacttgagattggaaacaatgtggtggttgggggcaattttctaagagctgctaataaatttgaatatttccctaaaaagctgctttctgaacttgtttctaaccaagaagataagcttaatcatcttccagtattattacatagctttcattaatattgaaaggaactaagtgcatgtagagaaggggaaataaagccattatttaagcttagtggtggtctcacatataaagaagtgaagaagtgtcaataaatacactaattgggcatagctggcttttttnnnnnnnnnnnnnnnnnnnntgtctttttgtttgtttgtttgtttgtttttaacttttaagttcaggggtacatgtgcagggtttattacataggtaaacttgtgtcatgagggtttgttgtacagattatttcatcctccaggtattaacccaagtaccatcagctagtttttctgatcctcttccttctcccaccttctgccctctgataagccccagtgtgtgttgttcccctctatgtgtccatgtgttctcatcacttagctctcacttttaagtaagaatatgtggtatttggttttctgtttctgcattagtttgccaacgataatggcctccagctccatccatgtcctgcaaaggacatgatctcattctttttatggctgcatagtattccatagtgtgtatgtaccacattttatttattcagtctatcgttgatagtcatttaggttgatttcttgtccttgctattgtgaatagtgctgcaattaacatatgcatgcatgtgtctttataatagaatgacctatattcctttgggtacatacccagtaatgggattgctgggttgcatggtatttctgtctttaggtatttgaggaatcgtcacactgtcttccacaatggttaaactaatttacactccccaaacggtgtataagcattcctttttctccacaaagttaccagcatctgttattttttgactttttaataatagccattcttactgatataagatggtatcctattgttttgatttgcgtttctctaatgatcagtgatgttgaacttttttttcatatgattgttggccacatgtaygttttcttttgagatgtgtctgttcatgtcctttgcccactttttcatgggagttgtatttttttttttttttttttttgagacggagtctcgctctgtcgcccaggctggagtgcagtggcgggatctcggctcactgcaagctccgcctcccgggttcacgccattctcctgcctcagcctcccaagtagctgggactacaggcgcccgccactacgcccggctaatttttttgtatttttagtagagacggggtttcaccgttttagccgggatggtctcgatctcctgacctcgtgatccgcctgcctcggcctcccaaagtgctgggattacaggcgtgagccaccgcgcccggccggagttgtttgtttttttttttcttgtaattttgtttaagttcctaatagatggtggatattaaacctttatcagatgtatagttttcaaaaatcttcccccattctgtagattgtctgtttactctgtcgatagtttcttttgttgcacagaagctctttaattagatcacatttgtcaatttttgcttttattttataacagtgatctataagatgtgaaatacagtctgtctataattcaggaaaaagtgaagtcattgattactcaggtttttagatagaaatattttagtaactattcagcttataaagattaataagtgaaatgtgtcactctcagcatatagttttatctcaagttcatattttatgttattttgtaatattggtaaaaatgattataatttcaccaaatttttgctagctccaaagcataaaaatgtgagttaaagattgccaataaaggtaaagcattttgtgtattctctctctgagtatgacttacatatttattgctggaggtattcaaagacatgaggcaatgacagtataaaaagaataatttccaaaacatcaccttttatagataactggcaaaagagaatattcttaatgtttaattattcaaaaaagtttgttcatgtgatgtaatgcttgttattattattatttgcttagcactataggcttggcacagtgcttacaaaagaagaagagatggtctctaccccaaggacttaaaacttgttatgttactagagagtttatgtgggtggagttttctttggatacaaactgtactggagttagctctttctctttcttttcagctcacacagtttgatataaacttaagtgaatgaattcattaataaaagcagattttctatttttatttcacctctgggctattttatacctttggagcacacaagcacaacaaaaggtatgttttacagttaattgtttttcccttttttatcctgacatcgtagataattaagcaacagcattaatggaacccaagtctccactcctataaatgcctgtgttgggcagaatatagattctttctttccttaaaactaaggcaggctggtgacaagcctatcacttagttttaattacagccactagtattctgatgtttcactgaacaaaatgaagaaatccagatgtatttttttccattattatatatatatagtagaatcattaatcagaatggattgttttaaaggtgagattgatctcacatattttgatatctgacatagtagtaagtgtatgctcattggacagctggcagttttaagggattaaaacattctgagatttgtcctggcagaggcagtatgtggaagccactgtttatgttgactttgtgactagttagagtttttccctggaattgtagtcacaggacagataactaaatggcaatatctgggagaaggctgagaaagtcagacatgaaaagtgtgggtataaacaagagagttgagtgtcagaaaactttgagggccttggagtttttgagacaatgtggttgaacaaatggaggaaatacctgttcctcctacttcattgcagtaattaagaagaggagaaaaaggcagagagataagttaaacagtaaatgattgaaataagagatttttgtagaatcacaaaatggatttgaggacttttttaagatgtggaaatacttgttcggatcagacaataccaatgtaaaaggagttctacagtttttcccccctgatttatgtaaagtttatttatttcaactcagtgccttctaagtacaactttaggaattttaggaaatgtgtscctacttggtaaaaaccaatgagaacaattttgctttctctcggtaaagattaatatagatgtgtatgaaaataatcatctatgtattacactctgatattgtatattggagacctttagaaagttctcattcattgtaactatgaccaagaagcatctttatatctgatagatcaaataatcaggtgaattaggtttctaatgtggtatatgatgtttttagttttgggggttgggaaactctttggaatcatttttctgacaagtgacttacagtgtaatgaatattctttctcctttttcccttccccttccttttcctttctcccctcccttctgtccttccttttttttttcatttagaaagagattgtttctaattagtctgtatgctatgtgctgagttgtgtgatagtacccaagacatgtatcttaaattgtatgcagggtcacctttttgattaagaactgaagagtactgattgggtttcttatataaactaaaggcactctagtccactttgggcaatcaaagaaactaaggaactgttggaattagttttactattttgggggtgatgaagataggataattagaaagaaattatagtctttattgggccagcagtttactaaacttgaattgggatttgtgaaatkttaaggcttactgaatatttgctctctaagaacaggatagagaaataatcttgatcttaaaaggagaattttaaattttttagaaagatctcttacagtgagatatcctgtataaccataaagttataaccatcagggatgtccctagttgtgtttctctggcatttcttccacacagaatgagttcatctcaattgttgatgttggtcatttgttgagtgtaatttaacttagggataaaagggataaatatccaactgaaccaaaaaggtaaagtttataaattatctcaaggatactacacaaaagataaaactcaaatatgcctgaaagaaggttgtggattggttgaagttatgattatatataagactgttagaatggccagctgtgaagyaatttgaaatatctagagggaacagcctgcacctctcccacaatagtacytaacagtgctccaacacttccaagtttctgtggtggggaaagaatgggagagaatagacagtcgagggtctatacttggcatagagaagttaaccaaaaaacagttgctgcttgtgttaagaacctgtatgtgctagacattgtgctaagcacttacatgttgtttttaatcctttcaactctattgtaagatagcttcctcccctgcaatacccagttggtttctctaaattctgatttcttttttgccttcttagcacttaaaatgattggtatttatcacatatttgtatatttatttaatgtgtagtctctacactagtctaaaagctctgtcagggaagagaccatgactgttttgttcaaacttgtatatggagtttctagcacagtgcctgatgtatagtatgttcccaataaatgtttgttgaaagaatgagtaaatgaacaaaaaatatataaagacaaggaaggaatgaatgaaaggaagaaaaaggcagaactgggatttaaacagttgatctgagtttggaaccaatttgttcccattccggtacaccagcagggttttatttcatttagaatattctcaattacaaatttatctgataawattttcacaggttgagctgtttcagagcacctcaaatatttggccctagaagtgttatatcttagtctgaggctgaatgccatgaaaaaggcctgcctagtccttttctcatcctattggaatattgcaaccatcttatggtgatagttctctctagaaatacagattccagggtcttgatttttaggtttctgtttctcctactcaaagagagtgcacttctctccctctttctctgcaactgacccttaatctggtccttgggctgctaagttgactttcagtaatggacagagtgattgttgcctgccctgctgagtttttttcctggaggagaagtgtgtcactgtgggaggagttgggctcaaccaaaggagcacttagcctggcaggtgccaggcacaggggcttggtttggtcttttagcagtgaccccagttgtgctgattaatttttttcattgttattaataaatacaattgagaggaattgttttgtttttgcataatgcttttgaccattttcatgtctttttattccttatgccatctttaaaaaaactttactctgcctttccgttctgctttccaggaaaggaggaaacgtaagcatgatgagagtaaacactttgtggatgtgattaggtcaaacaggaagtagctgtctcccagatatattgaatagatacttatttaaatcttgacaacttaaagtgtcctatataaactcccaagacagtaccagaaacagatgtgaagcaataactatctttacctgaaccaaattgcaatattgaagcttcaggcatatggtagtttattgtttgaagcaggctggcctgcttgcaagttaatagcatagtgagaagtgttctgacactattaggatcttcattctggatggtataaccagtggttaatctaattttcatcttcatctctgaaagctatttaaagatgtggttatctgttttcccagttaagacaaatccttttttggtagcaaatgttttcttccaagaataatgctttgtacctgttggaaactaattcagctccacaagtatatactaattactgacttttttcaaagcacagcattagatgctgcattggaaacaaacgcaaatrtattatacaaagtccctgccctcaagaaccttagagtctagacataattattaaactctcttattccttttatttgtgtcgctagtgtctaagtgaaccaatgcatggctcaaagaaggaaaatgctaattaaattrcatttgttattgcagaggagatacacagaagagaggagatggaatttcctatgcagaatgttaaatgccttaatagagttaaaaatactactctaggaggttcaaaaaatttaagatatatatccctttaagaggaagtacattaagaaatgactttttsatgttctctgagagttgggtgggattttgtcagtggaataggagatgaagaaaggagcatcctgctagtaaggggactagcacaagtgtggggaatatgggctagacgaatggaagcacatagtatgggataggaaacaataagttcaggtggatttaggtataggtatgtataggctagaaaatttagtgtgatcatatcatcgtgatccataaggctaagctaaggcattcggtagatcataggggaccatcacaaccaaatagtccaggagcatgccaagagcttcgcttttgaaaaattaattcagtgaatagttagtagagtggattagagggttaaaaaaaagagaagctacagaagcaacttgtgaggactactgcaaaatttcaggtaaaaggtaaaagatttaaacaagygatgaataagactggtaagggtatatgttatgggaagcaaaagggaaaggagtcaaaatgactcctattgctttcttcttgttcatcacagtattgaatttttgaaaagtcagagggaaatgattgtactaaatatctcttgtcagtgtgcaaatccatttccatctcataaattagatcctcwctgaaaattaacagttttttttcttcccacggaagactgggaaaaagacacagttttaaaggaatgaggatatccttgaaaatataattgccttgaggaattagaggcataacataaatacaaaagatattaaggctaggacctaaagtgtgtaggcagggccttgatgatttcagagacataaggtaaaacttagctaccatgagtatgagaaaattgaagatactagagattatggctttttcatcaggtggctctcacatagggattagtacatggcatctgtgaagaatagaacaggtgcacatggagtttggttacttttaaaactctctcagataaagtgatgactatgactccctggttatattgccacattctgtccttgtccacatgagatatagttgcagcaaatattatacttaagatgcaggctctcttctacttgtccttttcaagatgaggaaatagtgcaggagaacatagtcataagtgagaaaagacttattgaaataaaaattaaaaaatagacttaaaaaaacagaataaagtcaaagtgaccttgttggggatccttgtcattcatattaccttatcattcatactaacactaacattcattcgttccttcacactataagartatgaactcagagawcttctggacatgaggtgggattcaaaatagaaaaggaagaattagtctggaggagtttataatcagtttgtgagtggagataaaatatatgtacatgaaaaagaggagcaaaaggctactgatacaaaacctagtcatttgtccttgggaaactcattttatatttctgaaaaaattttattccactaagtatagtaatttcagatgggctttttggttgtccaatattttaaatatactgattgatttatagtcttttagtttgcattattttcaaaaatcagtctgctgtaattcttatatatgtttctttatatgtaatatgccattttcctctggctgcttttttcccccccttatcactgtttttaagmaatttgattatcatgtgctttggtgtagttttcttaatgtttcttgagattgaggttatttgagatgcttggatctgtgggtttgtggttttcattgtatctggaaaattttcagccattatttcttaaaaatttttgttcgtgcccctccatattatacatgtatattatgcagcttcaagttgtcctacaactcactgcaactccctgattttcagttcattttcttcatctttttcaccccacattttgtttcattctagattgtttctatttataagtcttcaagttcacgtatttttgtcccgcagtgtctaatctgcttttaattctacccagtgaattcttcatctcagatagtctgttttcatctttataaattcaacttgaatctttaaaaatatattctatttctttgcttaatatattaagtctttcttttagctccatgaacaaatgaaatgcaagtataatagctgttttaatatccttgtccactagttttatcatctatgtcatttctggatcagtttcaattgattgattttccttcatgagttgtattttgtttgtgtggcttcttggtatggctggtaaatttttattagatgccagagagtgtaaatttcacgattttaagtgctcagtatttttgtatttctataaatatttttgaacttttttttctggtatgcagttaaagtggaaatagtttgattcttgcttttatgctctgtcatgctttcagtgcttgcttttaagctctgtcatttggaaccaggatggcctttagtacagggatcattctcttcactactgatgcaataccattctaatactctgatcagcgttccttgtattatgaagctttacacttttgatgatgggagaatgacctattcctggccttggatgagctctggggtttgttccttctgttccttttaagtgtatctttccctaaccttggttagtttcttcatatacatgtactaatcagtacttgcttaagtttttgtcagactctctgcatatctctggaactctatatgcaggtmtctttttgccattgctctgctctacaaactgtagataccttggctcctctagactacaagctccatcttcttaactcactgaagttattagagttcacctctgtgcattgcagtcagtagtttctctctctatgcagtaagctgggacaattgtagggatgacttcatttgttttacctttctcaggaatcactatttttttgctgcttcctgttttcatgtattttgcccagttttttagtagtctaagccagcaggataaatctggtcgctgttagtccatcttggccagaggcagaagtcttcacaaatgtgaggaatgttacataatatatataaagtatgcattttaattaagagtgcttcacacatagaaagtattcgataaaagatggttactattgctgttcctcttcctgcttcctgttcatcagtgaagctttatcttatcaagcctcttatatgaagccttcctgaactacttatttcccaagtgattgcttattctttattctttgtacccatattacttttttgcatactttaaaaataaatttttaatttttgtgggtacaaagtaggtgaatatactatgggttagcatacttttattgcaacatttacaaatctatgttacaaatatttttctgtgtcttgtggcagattgtaagctcttagagaaatatctgccttgtctacccatccctagtttccaacatatagtaagtgcttaaatatttgttacataaaagaaaaactgagtgtcttatgccttttatgaaatcttcaggaatagaatttttgattgggaaggaaagagaggtggtttggaaatctaagaacatttgagtaaatgaaagcagagaggaaagtaaggttttggggcaccagagagcaacatgagagcaaaaggtggttggttgaggtgtgtagtatatataacatcattatatgatatatattatcatcatcgtcatcatcattatcatcaccatcaagttcctgtgaaggtgagagtatagtggaagagatatattgtgatgtgtcaatgaaacaattttgtgataccttcagcacaatgctgtaatatacatgataacattggtaacattacaaaatgcaattgtgtgagtcagtataacttcaaccattgctgtaagggcttttaaacaaactgctaaaactcaacatactttttggagtaggtggaccttggaagaaagcggtggggatggataaactaagaagcaaaaaagaattctaaataatagaaaatagcataaatgcaaacatggtgtaggctttaagtaagcatagtatagcagcaagaacaaatggaccttggagttgaatacactagggcttcacttgatgcaactctgatcaaattacgtggcctgagtcacaattccttcatctgttaaatgggtatggttgttgagaagattatatgatggatagagaaaatttattatatatttggtaatagtgggcccattaactattagtttcttttgttttagacattctctatcttctgatgaggaaaggaaaaatgcttcaagaaggactttgtgattccttatcactttgtgtaagagcctaagtataatatacatgagtgtaactgatgttcacatttatttcctatttccatggcaaattaggattgcattgcatttttatgatccagtactaaggaggcctacatcatttatacacctaagtttttcacatgttctaggtttaacttgtgtttaaacatattaggattattaagttttatgcacaaattaaactattttactaccacaattcaatatttttcaggaatgcttctatttataggcagcatatctattgaatgaaagattgaaaaacagagtatcagaaatcctagttttcacaagtcttgaacccttttgtattcatttattcattctgtgcataaaaatcagtttttatttcactttcccatcaagatagaatataaggtatgagtaaagtttaaaaacctttgattttcaaaaataattatactctaaattcccagtttataaaagactacttttaatgtgcacttacccacaaaactaatttggatatatgggaactttgaaggtggttctagcatagaaacaaggaaatcttttatttcttcactggaggaaaaattcaggactccttcggttaaataactatgtttggttaagagaactaaggaatttgcccagtcaatagaatacatcgataaaccattgtcattttggagccatttttcagcaccctttttggtcctcagatactgcattgacatacataactaatagattttgtacataatgctgttgatcctggcaaatgaacagccaccttaagtcatctgcctggtatctcgagtgacttggcaaggatctggcatgaggtgtcacctgacttcatctgctcctttcactacagactggttctttgcatttataaacctcagtctggcctcaatagtggtttccttggttgagagtcatcttattttcagctgaagacatgttacctccaggatgctggtaaacatgttgcaagactaagttctgatgaatctcacaagactcctctatagagaatgaactgaaaccgaggagctgacagtgttaataattcagcatttggcagcactgtggatattaatgcatttgtagttcaccttgacaaaccttggcccaatcactaaaacggactaaacccatcactaaaatgagtttagttatctcagtttagtctctagtgagaattttaatrtatatattttaaacctatagatgaaataaaaaaatgttaatctcctctaagacatacaaggttcatagccccctggactatgtgttatgaaataaaatttgtgttacaataaatcgacatcttgatttagtgaaaataaggtttaagaatttttatatcacattatggctgatttggggtatttttagttgcccattcattaaaaagttcaggtgaagtacctattttgacatttyaggcaaacatgtaacttttttctttaagcaaccagtaatttatgtactctatgcaggtaaactatataaagaatttattagaaaaaataacacatgttaatagtaataaatacatataatagttaagtatattcagtacttaggacttaaagttattttataaaaattactttcatgggggaaataaatgtatcttcttgtattaaaatgccaatggaatgacacaattcctattaaattattaatagctccaggacacacctcataatttgggggtgcctaaaaataatgtggcaatggctggagtggaaagatcctgctccttaaaatttgatttgttgagctgtctgaataatctgtgtccttctgatacataccaaaaacattttacaattgcaaaggagttattttcaagctttctctagcccagcccctttcgggttgatatgaccactttgctgtcagattttctgcgttgaagagtagaaatgaagaatttaaactattatataaagaaaaagtaattttatataaagaaaaagtatttatataaagtaaaagtccttgaagtattcaaattcatatttctacttacaaatcctaattattcaagtcgaactacaaggggttaggtttatacttttaaaatatttaaaaaaattttttgtggtgataaactgtggtttacattatgtggtgaaagacacagacaataaaactgaaaggaagtaaagaaatcaaattgagactattttgttttggctctttataaagctgatttaaatttttaataaatttcagtagtcagagacttatatttaagtattatatttttattaacataaatcttcaagtgggaaattatgtccacatgataaatatgtggggttaatgaaggtaatttgccacctgtgtcatgaagcatctccttttgacccgtaagtaaaaatttctaagttttcttgctaagtctttagagtctaagagatcagaattaaagggaaaaaagtttagcactataaaaatctcagtctrccaagaaatcatgcataaggtctataaataagtagaaaggaattagaagtatgytttaaatagcagattggatcaattaaaataatttgtaggtgtgtcttccttatgctatggtagtaataaatggcattgtgctataatggaatagatcttcaaccataaactagtttggttactttggctcaatttctttccacttctgttttccttgcaaaggagaatgcactacatttctgttagcaatgtaaatttctcttgccctggaaaagtcataaagtccaactcgccttttgacacagtctatctaagctgcttggattaggtaaagctgatcttaaaagagaaaaatcgggtactcagcaaaccctagcagatattttgacacactcttagagcttgcaagagtcatcataaacttaaacattacctttcctagtacagaaaccacaataataaatatggcttgaatattttatgaatgactgagcaccctgctttgctaataagtcttctggaaagttatgacttttttgggatggctttattttggaagaaggagtgttcaagagaagctactgatgaggtgtcatataattttacaagttgcataactgcttttaactgctaactatctctgattaaaataacaattgagcttgtaatttttttctgaacagctgctgctacaggggtcattaccttggagagctaaaaaataatygtactcctggtacgtgagttatgtagtcttgtgttttacagcaaagcacaaagtttaaaacctatagaagaatgttatttgaaagctgtcaaaccatgttaaaaaagactgcatcatcaaaaggccctagtggccacgattctgcatgtagccttgtcttattcattataaaatgcatgtttataaagttccacagagcatccaattcccaattcacttatatcagcaagacttaacttgctcattaatctaaattcttttgcaactttaatctacatgtttaattaatcataaaatgaggcggtaagtaatttcagcaatgtgtggcttgttatcagatgcatttaatcactcttctgtgagctcatttggaaacacctgaagatgtcgagtgcagtttgaataagcataaattattctttgtcagtgtacttcactcaactaataagacattaatttaaaaggcactgtttgtcatttttagatctttaccaatatttttagcttagcaatataactctaattgtatatatgattcacaactagtgcccgacataggaaagggtaagagtttaattcatttttcttatttacatgtaattatgtcatgtaatcttagtttttaatgaggattaaccatcttgtaagtattcatatgcttttggaataacgtactaatgaattatagtaggaaaaattatttgttggtacaaaggtttgtgattccttgtttcctgcctaggttagaactgaaaggaggtgagttttggaagagggcatagatttgaggatatgggtactacacaggggttataagatgcagatgttaaccttaaaaaaatccaagtaagatagtgatattcacctgtctcacataataacatatatagcctttatatgggactaggtagcctaaaataataacagtcccattttccccctagtttcttaacagtattgtacagttgwtgatggtattttagaaaaaggcaaaaatagccaagaacaatagtaacaaaaacccactcatagcttcagaggaaaaaaaagtcgtgagagctgaatgattatacaccttgatatcaggagtatgggaataaaaattgcgttttataggatgtcatcacctgtcctgtttatgccatgagagcagtgacacacgtaagaataattatctcagtggaaacaaatttatttacctgctgtggagcatccctgttcatcttactcatgaactcatctccctcattcgttatctatggattgtcagcagtgagccagaggggatgattcctaaaaagggaatattggtttgagttgaaatatagccatattctccatttttatttgatgtgcacatctcctgggcttcttccctttcttcagggatcctttacactgagctaacagttatttatatgtccatttttttgccctgtgcctcatgactatgtaaaatttttttcctcttttcttttctaagggaaagcaaagtcccaggaaatctcatttttacagttcaactcatacaggccatagcagcacattgaaatgaaatgccatttacctttatttcacttaaagcactacagatttttttgttttagaactactgaagaaaacttcaaacagtggaggcttcctcaaaatcaagcttaaaaaacatttcatttgaacttaactttcctgataagaatattcttctcattcttgyatagtctttgtgaataaattcatatagtttaatatgaagacttactgttagtttttttgaacatgaatcctcaagctttcttaactcccctttccttggaaaacctaaaataatttttccaaatatgtttattttctaatttcttgctgtgggtgcaaagaaagaacaaaggctgcctcccckaagcccaactcatatgtgagaggctgccctgttgtcctattaagtcccttcacacagacatggatttatttgataaaataccacatgttaactgtagctttttgttctgtgacatacttcaagaggaaaatgataaatttagttccatgcagcaatatgtatttatgcagatatatcccactacaactttatccagctgtactcaacacacacatactttgcctcatcacaaacaaggccatatcacttaaacgtgctttttaaaattttatwttatttatttatttatttatttatttatttttagatagggtcttgctctgtcacccaaactggagtgcagtgrcatgaccatggcttgagtagctgagactccaggtgcataccaccatgtctggctaattaaaaaaatttttttttgaggtggggtttcactatgttgccaggtctggtccgaactcctgggctcaagcaatcctttctcctcggcctcccaaagtgttgggaggcatcagccagcgcacctgaccttaaacatgcttctttaatggactacttcacagttgattaggatgcacaatacccagaatgatggactgcttcagcaggtgcagctgaatgaataggccttccatccccagctgcactgacaggatggttagtagggctcttattttaatgcacaacttatatggctgaaggacagcatgctggtaaagaaagatattactaacggcaaagggagtggctgaagaatgagtaagtaacatgtacacattactccataatgtggctggataatactatgtggtgtttactagcatgtgctctgggggaaggcttttggaagtccttagcagacatccaatcttcagttgctgtgggacttcaggctcattagacgaatgagaatgtcagggtgcagttagttacagacaaccctctgacttcatgagtcttgatcccdtatattaaaaatgggagaataattatatattcagttataatatatgctacctcagagaaagttctcccctcaaaattattattttttggagacaggatcttgctctgttgtccaggctggagtgcaatggtgtgatctcggctcactgcaacctctgcatccctggctcaaatgatcctcctgcctcagcctcccaagcagctgggactacaggcatgtgccaccatacctggctaatttttttatttttttgtagagacagtgtttcgccatgttgcccacgctggtcaactgctaggttcaagcaatccacctgccttagcctcccaaagtgctagggttacaggtatgagccactgcacccagtgcccctcaaatcattaaacaagtaaattttgttctaatttttactgaaaagtccatgtgttcttttctacaaacattctcataatttatttccatgcatctttgctttggatcctagctttattggtgaacatttatgcctttctatagcaatctgggttttcttagccaattgaaatgggcatttattagatcatttaagcatcatatcaatatagtatatttggcgactttatgataagttcttatgatagatgttcaaaactctgctcaggtgacatttttatggatccacatagtttttgtcatatatgaaaagaaagcattgagttgtgcagatggttaaatgtgcattgagttatttctctggaatttgcatgagaatggaccgacttgtagttgtattaacttttctagtgcccaggttagaaagtttgatctgtgtagtttttaaaggcagcatccaaatcacttatattcagaagaaaatggtaacagatttagaagctgtctatattttccccattatccataatacatattattggcaatatggttttcactctttgttgttaacgtatcaacaatgtgcaatagccactaataatcatttgttaatgcatgcttccaagttctgtatttgaaaatctcagacttcatatatggtaagtgatggagtaatttataacttttatgttgaattcttgctactttaaaaaattgtgcttctccttttttaargcatatgacttacttaacagctgatagtcagttacctggatttttagtatttttttacatcacaaaaagatttctctgaagtttgcgcaggggtctatttgtaggcagtttccaacttactaataagtaaggttctgaaagttataagttagctgtctggaatagatagtctcatagaaaccaggttgtagatggtgatttggttccttgggcaacctactgaaacccatttactatataatgtggctgaataatattattgatagtgctatagtatttagcaactgtctgtcaagtgattttgaactctcattttgaaatctaactttcatagcattattctgatgaatttttggtagtgcgatttgactttttctacctccattctaccagttcacagtgcattctagcagtggaaatcaaaaaacctattgagatggaatttgggaggaaaggaggacttactgatatccctagctgtagaaagaaagtaactgggtatcctgtctgaaagaggaaggatgtgatgatcttcatggctctgttgtggagatgtatgtctgcttatacatggcaggcaaccaattggaggtttatatattttaaaaataaagaaggggcggccgggcgccgtggctcacgcctgtaatcccaacactttgggaggccgaggcgrgcagatcacggggtcaggagatcgagaccatcctggctaacacggtgaaacactgtctccactaaaaatacaaaaaattagccgggcwtggtagcgggcgcctgtaatcccagctactcaggaggcggaggcaggagaatggcgcgaacccgggaggcggagcttgcagtgagccgagatggctccactgcactccagcctgggcgacacagcgagactccgtctcaaaaaaaaaaaaaaaaaaaaaaaaaaaaaaaagaaggagcattttataattttacactgattagccaaaggatggagaaacccratacttctgctcgttcamcatgcctcacagtatattccaagtattttcattgtatatcttctacttactctaccaccctatgccccacaatttggactcttggtttttaaatggtagtacaggtaagagtagttaagtttctaataccagaatagttttgaaatatattattgttattatcatcatcatgtagagacagcatctcattctgtcacgtgggctgaagtgcagtggtgtaatcatagcttgcactgcagccttgaactcctaggctcaagggtttcttaagccttagtcttaatatacagctttataagtgtgcattactgttcacagctaactttaaaattgttttttgtaaagacaggatcttactatgttgatcagactggccttgaacccctrggttcaagggatcctcctgccttggtctcccagaatgcagggattacaggcataagccactgtacttgccctgtaatatattatttaataggtcttgtatgagatagggtgatacattcgtataggaagtagctgaggttgaccacaaattaaatattcttaaatataggacaattcacttaaatgaaggatagtaattactgtttaattacattatatctattaagagtatcagaagaaagtcatatgaaagtgtaagtaggtgatggaaaagttatctggtcatatcattttgaaactcagcaattttgaatcatattcacttctttcacttgaaatctggaaaattgcactttttttattgccaagggggaaagttgaataaaaggagggtaatggggaaaaaaaaatgagagkagtgatattgaaaaggctctaaagattagtcagtttcaagataacagtttgatgagttatgagtaaaatagaaagaatttagtttcccaaggaaacacatgagctcaaagtgtaggggaaaggtgcttggcaatacaaatcatgtatttttattaacctggagcatttgaaaaaatatgcagaaacatttgrcaaactgaaaactcagctgacttcatgcccaccaaccaagtgaaaaatctgattcttcttcctctaagcacatagctgggttcctcataaacagagttatccagtgtataggttgcagtgacaagaagccaacagtgaagtcaaactcataagcatcctatagaaaatccctcaaattacatctgtgctgttgccagctgtactgccagggaacaagaactgtacagatttctgtgcaatgactgggttacttaacacaacttgattagctctgtttctgccctgtctttggctgacagctgaccgccatactgatttggtggatgtaagactgaagtgaatacaaccacttatatgcaccttcttcttgtatgctatcactgtcttgtacagtagtcatgctgattgactccaaaaattcattttgtcactcattcaacacacagtttgaaaactattgcattaaagtaagcaaatttttttccctgttttgatcttcatattatttagtctgccattgttttcaaagaactaagtctcctccacaggaccttaattttattgcttgtttgaataaaatcattaggaagataaattttgtactctactagtagtgtataatctattaataacagtatgtatcaagtgattaactgtgccagttctgtctatctctctctctttctgtttctctctctatatatactgaagtgaatacaacagagagagagagagacaaagaaagaaagaaagaaagagagagagagagagaaatmgaaggagagagagaaataattttctcacttaatcctcataattaccctgtaaggtaaaaactattactgtacccatttttataattggggctcagagtggtagcacaaacttttctgatagcacagtaaatgatagagccagaattcatattcaagattggtttattcaatgactgtgctcttttcctaaatcctaataacttcctaattttagcttaaaaattacttaattttttaaagtaatttttaattttttgtgaagagttgtattgcaaagcaaataaaaacagacttttaatgatgattgttgcatatttttaataaagttgaaacttcttgataaaataattttttccctgcacagaagaaaagaaaaagaagggaagaaagggaggaagggagggtgggagagagggaggaagaaaggataggaagaaaaggaaagagaggaggaaagtaaagaaagaaacagaaagaaagaaagaaggaaagaaggaaagaaagaaacaaagaaaggaaggaaggaaaacagaccctccagaatgctggatagaaaaacttactattcttttaatatcttaaataattaaaccttgtatgtcttctttttaagtaaaaaagaaatagataaatatggaattacatcttatgctacaggccagtatattttagcaagtcagaggaactcaaacatgaatgaagagtggaattttcctttcattttctataataactatgtttattgaagagaaaatggaggaaaaaatgaccatcacrcctggttttgaagaaaaacttgtttatgtgcgtaatacattggagaaattgtttgggatcactttaactctgcagaaatatgaccactaaaattcctaaccaaggtgtggggctatcagatccatgaagctaattaaataaaatgagtatttgtgaaggtaattcgcttacctcatttttccagtccctttctgtaaaatagaaaatattttaaaaagaaaataacgggtgcagttggcttttatgatctctttttccctctctccaaaccctgccacatttctaaatttaatagtaggctatttctatctttgtctctcctactttctgtctctttctttttccttctttctctcctctcctttctttcctctctttttcttctctcctccatcttgtcatctcttttgccccttcattttgcattcttacatgcaacccttataataatctccattgtaatcttcattcttttattagaaagatgattcttgaatcatctaggtaaggtaggtgctactggaccttgttttggctcattaaaaagataatctagaaaaataacgtctattctgcctttttgcatctctgtctttctcccatatcccaaacacacactttcagaaaggaatctattgtcctatttctggaaaatgttgaaatgttgccctctactttgttaccttctcargagtaagattggtctgtagatattgtatgaccattagagaaaaaccaaagattccaaactaaaatttggcattaatccaggtacttctgccacattaactataaataaacctttgtgggcatacttttatacaaggagatagacttgttcaatatgtaatagctatgtgatgctaccccagaggagaattgaaaacaggcaagtatactagatctaagcttcaatgaactcagggtcaggattctaaaaccagcctcctcaagggtactcacacaaggtggaataggatgaccttggattaaaagtattgcacaaaaatatgctttgaggaccagaggaaggtaaggagttctttcagtgatgatacagtgcagtaagaacatgatcagtaataggtaaatgagatatattgagatgtttcccaatagctctgtgggtacacagatttggtttatgaataaggatataaaaatgcccacagatacatggctgcaaccatgttggacgaatatgcaaatcatggggcaatttaaagtgtgttggtaggtagagtgagttgcagaacaagaaattaaagcattagtatattcagatgagaccggagatgaaggagaacagtaattgttatttgttgggaaataatttgcaaagttggtggattatgtaaatgacagtttcctgacttattgagtctatagtaatgggtctattgttactctagtgttaccatgtttatgtattttaatgtgaatctctatgtagaatgcaagcccatgcatttttagaaaagtattctattcttgattcaggattcttctgggtcttagaatcatataatgctatcaaggtattacttccctataacaccttaggttcactagttattaaggtgacaaattaatttttatgatggggcaagtacagaaaaaaattgagcatgatttctatgtggaagttaactttgttttgttacatgactttgagttttacatctaaccatgacctttttggtcacaagtaactggctgagcgaaagtgagcacatttccagcaatctgtaacccacttaggcagacctcatcctcactcttcgtcactcttaatttcactattaaatttttaaatccattcaactatttctaacaaagatacacattttgcttctctctttaacctcttattaaatagtctcatcaaatatctgcagagtggagccaattgtgcacactatgtcagaatgattctataataacaacttgctttaggacacattttcttagtttatgtgttttcagggtaagagggagggaaggggactaacttgttttgacttacatacattatgttatctcatttaattcttataagaattctgtgaacaaaattgccacagattcttatgtaaaggttaacattttaagaagatgccaacttatccttgccattatagtgggctaaattagtgagaaacaagtaagaggtaaagatataagtgagaaaatgtgaaagataagacatgagccattaccatttgccttactgccacagcgaattatgggaaataatggacctaagggagataataatactgtaattactattactttattccatgctatctcagaaaagacaaagattcattcttctgccaatgtaggtaagagagtgttggcagaaccacagacataaaccattttttaacacattcgtataatttgacttctgacaaatggatcttttgatggcaaagggattttgacagaaaaaatgatatactaaaacaacttacttttttttttataacagtttttgcttcttgttttcttattccaaatctcattaggtaataattactaatttttaaacaaaatacaaaatacttaaaaaaaggtcggggcaatttttttttttttttttttttgagacagagtctcgctctgttgccaggctggagtgcagtggcacgatctcggctcactgcaacctccacctcccgggttcaagcgattctcctgcctcagcctcctgagtagctgggactacaggtgcccactaccgcgccaagctaatttttgtatttttagtagagatggggttccatcatgttggccaggatggtcttgatctcttgacctcatgatctgcctgcctcggccttccaaagtgttaggattacaggcatgatccaccgtgcccagtccagggcaaatgtttttaaaaatatagacactacatattgggcactatgctcactatcagggtagcaagatcatttgtacatcaaaccccagcaatatgcaatttacccatgtggaaaacctgcacatgtaccccagaacctaaaataaaagttagaataaaatatttttaaaagaattttttaaaaaagaaaaaaatagaggctttctttttaaacttaaaaacaatttgtggagattttrtcaaggacctagcactgtggttggtttacaacaggtgctaaataaatattattaaatcaaaatgcagagataaagatgtgcatgttcattcattcattctttcaatccacagacatttatggagagcctgaaatgttccatatagacatgtttgagatgtaaatgtgaatagcatactaaagttagttttaagttaacttaaaactctaatgtagagacaagtaaaggagaaatcatagcagattagtcttagaattgagatatgaatgaaaaaatatatgtagaaatgtgtaatttgtccggaagaactggggggaagcttcattgagtaggttaacacttgagctaccttttatagggaattatctggagaggacatggagataaaatagtctaatatgggggtataatatttgtaaatgcaccagacattaaaagggactagtatattttaggaattctaaaaagttcagtatgattgctgcatgtggggcagagggaatgggggaaaggattgggctgaaaaaaaattcttgtgattttggtggtgcacttgattatttcctgatatgaacctggaaaatatttaatttcaactaattaattttgataagatacgtatttttctagggaattacctgttttattataatctcctgacacatactttttagtgcctttcttacagtagatgagatgttaaactgttaaaatgatgaagttgtacggagtgtgatgtgatatgaaaggactttggaatgatgtattgcaaaaattgctagtcatttttccttaaaatggtcctttttgagttgctttttgaattttcttatactttgctagccaataatttgctaaagcaacttgtaggtcagtcagatgattccaaattctaagaagtaaaggcagtagatatgcacataaatataatttatttttgtttaataatttgtatttatatatttaagagaaaaagattaatatgcaaaatatgtgaatgcatgtcattttaatagcttcagggaaatgttagctgggcataactttggtttcttcatttctgtgttacttgtgatatatacttttaaggctttattccagaggcaggtttcattttcacataagcataaggtcaggctttacaatatttgttatttaatttttcttctttcagagaaacacctcagagtctccagacttcattttagagaaactataatttcttcaacttgaaattgcttgggtaggtcactaccagattatagagagcatgatgtgctttacaagttgaaaagttttccaccaagtaaatagcagcagtgaaaattgtcagagaaacaactaattaatctctgctcctttacagctgtttaatgcaatgcataactaaaagtcctgttaaattaattaatgatttcaattatgaacttttctccaaaatgttatgatttgtatcaggctgataatgcagtgacctgggagtgtgagatctgtgttatgaagagagttgccagttaattgattcacaaattatttaaagtttgttgcacccaagggagtgctcagtttcacgacagtcatttcttaaagtgtacaaactcctttttcaccttaagaatgtcttcagttattaaggatgataaaataccggcgtgtttctggagctgtgagtaatcttaacatttatgatttagaatttgtaggggactatgtggagattaaatctatgctggaaggaggaaaaagttatgtaagtttgttaatgacctcttttatggcagcttttttattgtttttgttttagtcattttaaatagttttctaaacatcactgtttacaattttcgaatatttgccatacattgaggatattttatgttaaaagatatgcattcttaagatatgcattcttaagaaattctgaatagtaaataatataaattgctttgataattggtatttgaagcatttggattgctscagggaggtgtaacttgatgctagccttcaatgttggagaggtgctgacctctcaatacaaaagcatcaatatctacaggacaccttgagtgttttttgtagcatatagggaaaaattatatacttgcttctagtctggttattttacacataacttaaataacaaataaaagtgtacatatatgtgcactgagaaggaagggcatcaataatggcattaatattttataatacatttattagttttattaatgtttctgtgctgcacttgggctgatttcagagtagatgrtatggccataagcaagaaccctttactgagtgtacatgtctaactgaggtggaaggaaaagaggtggtacctgaggagagattcttaagcaggaagagagggcagcaggaagtctctggatgtgacatgaggggtggctatagtattagtgggctgtagaatctcttctgttctacacacatttgggcttcatgaatagttaaaaatccagtgcttttagggtggctgaaccatacccttagtagtttcactccaatttgacaggcagtatgaaaaagtcatttttcatttaatatgaaaaacaaattttccattggagaaatttktctctcagccctgaatgggtagatgtattttcaggatggagcaggaaacttgtattctggacagacactgtgtttgcagatttcacttatcctggtaactcttctgttttacttcttacatttttctttttaatccaagaaaattgcccaaagtgaagacaaatagagaaacagtattattaaaaataagtttatctttgttaaacttgctgcagggcaaaaagaaatggacttgaaagggaagtaaatttatactaatttttgcattgtaggaaatgtactattttagacactgactgactgcttctgttttctaaaattaaggagcctataatctcagcaccattaacaagtgctgtcattcagatacacagtgtctggctgatttaaataaaatgaaatgaagakagttgtttctggtcccttggcttcactcattgccataaacatatgctctgcgtcctgcttctttccatcttatttatgactttaatttgttgtgtgggctgcgctagaaattaaatttaatataattctccaagggaccctgtcatataataacatggtaatttctgtgtatccttttgaaaaatgaggaaattaattcttcctgacatgttctaattattccagtgtgaacggcaaatccgtttttcctagcccctgaagtgttataggcaaatggctggtgttcaaagctgaggtgctaatgctgaccagcagtgcgtttaatttgaaacatgagcagacacctttcaacacacctttgtaatattggagtactttacagaaattaattcactacttatttgacagcttagcctcgaggttatgtttttttattcatcaatgctatagtcatgttaacatgtttcctgtttccttcagtgcttggtgtctatatatggaacttaaagtgtgcaatagatagtttaaatgtatgaaagtggagaatctagacacttcagaaataccagttgtatgccaatctgtgtttacactttatagagaggtgtagtgaggtcttgaatgttaaacttaattatagtctatggttggcagctttaactgaaattacatagtgtaggaattattgggacaatcttgctgtggaaagacaactgtatrctgtttccctgctgtaaatttcagttgtaaaaattcaatttcttacacagggaatgataccatgaaaagacagtttgtgaataaaattttatggaagaggaatctcaagatctgaactctgccaggaaggaagtggctatactttgagagataaaggattaaagccattttttggtgctgtagctgtgtaatttattattcattcagatcagttggaaggtctatatagtattctttagaggaattacaaaagaacttactttatccataatctttattgtgaaactagctattatatacatttctctaattaggtcaatcatttgtgtcagccctgatacaacttctttgttttagtgagcagttgataaatgccattacacattggctatttattgtggtatmaaatgaatgcatgagattctacttaaaatagaagatagaaatacaattaaataaaagaaatagaattgtatttggagtgactgtaattaaggctctctgtttatctggttctgtatctctgcattacattccctttacgtttcaacttaaataggagaaatgtgaatagtagcataattattctgataaatagcattaatattgcccatagtttttctgttggccattcagcttttagatatttaatttcattttctctgccaatctactggaggctactgcgaaatttagattatgaagagtgaagaaaatgatgaaaactctctgtcttatctttctcttatacttgcctgatgaaaaaagttcttttggctagaaatttggaagaacataacaatatacttcttcctattcacctacatgctctcctgtacttcttgtcagaaggttattataaggttacttctgtggcatttaaagggtaggagctggaagaggtatcaggaggtaaggagcgagcaaggggatctctttttagacctagggactataaaggttgctcaagatttcctgatcatggacttctcctttgtgccctagggaaggaagggaaatctgctgcccctctggcccctatttttcttcttttttttttttcactgatattgtagaaagagtatcaccaaacgacagagataggtagatcagatcctgatcctattagaccagatcctcttcagagcctgatacactatttatatgggttctaagaaagacttgaagatttcctgtattcctaacattcttcaaaataaagaattcatagaaagttcttgactaggttagaacaagctgctcatatatccaattctgcatatacctagttccattctctttctaggaaagaaactacaaacatttttacatgcctccatctctggatgctgcaatcagtgtgtccagcaaaataaatgaaaagaggtaaatatcgcccaattttgaaattttttctcttaaaatattacttaggttcagtttttagtcattttaatttttaaaaatctcttattataatttcaagttgatgtataggaaatggttacacttatttctatatactctttacttgaatcaaagcaaattgacacatatgttaaattttatttaaaaataagttgcagtttattttgcatatatagtgtatatatatgtatacacacatatacacactcacacacacaaaaacatacatacttccaaaaggcctatacttgatttgtctttccttattaaactcattgataaccttctttttaaactagtaggtttgtttcatacatcaaatttrctcattatacaggcttatccaatattgtttactgattgatggctatagttaagaaaaagatcttcyctacactcacacatgcttatatttttacaataacaacttttattgagcatataccatataccagacactgtactaatcactttaaatgaattgtctcatgtgaaactataagcaactctttgaggtatttattatatctattttcccagttttatacatgaggaaactcagcacagacaagttaaataattttccccatattrtgtagtttacaggtggaagaatgaacattttaacacatcaagtgctgagaagagtgcctggcacatagtaagctttcactgaatgttagttgcccctgtttttgtggtagaatgctatgggtcctgaattgcaagaatgattttaggagacttgctcaagagaaggtgatagagaaactaaactacttagtatttaaacttagcttatgaacctagttacttataagacctttaatcttaattcacataaacagatgttctttgagaacttgcaatatataaggttctcttttaggtactacaaggtatataaaacatctctgctgtcatggagctcacaatctagtggggttgggtatggggatatgggaaaatatatactgactgtaatactggatagaataagattaattttaaaatagttcaggagagagaatttctaaggcccttaccttttttttwaaaaaaaaaaatagagacagggttttgctctgccccccaggccggagtgcagtggcacaatcatggctcccttcagccttgagctcttggggtcagtccacctcccagccacccaggacttaaaaattagctgaaactacaagcttgcaatgccatgctggctattttttttttttttttaatttcttgtaaagatggagtctcactatgttgaccaggctggtgtcaatctcctggccttgaacaatcctcccaccttggcctcccaaagtgctgggattacaggtttgagccaccacagttggccaggcccttacattcttaaatgtgcctacattttttggccagattttatgcttggttcacagagaaggctaggattccatgaaaagatgatagtttggggacagaacacagtggagtggctacatgcatattgaatttaagaggctacatatagcaatatgtggagatgtcagacagttaaaatgagagcgaagtgtcatttaccgaaaaattcttatgcaagaggcacaattattcactgctcagaatctattttctcatttaatccttccaacaacccagtaaagtagatattattattacaaaacctattttacagatgaggaaactgagacttagaaagattaactattttgcctgaagttgccgagttggtggatgacagagccaggacttaaaattaggtgtacatgattctgtgctcttaactacaaaattacattgtgtgtaagtatgagtagggaactcaaaaaagagttctgggctagagatagagatttgggagttacctgcaaaggagtgatagatgatatatggctgtagacagagagcgagggaagagggaggaaaggagagagggaaagagcgagagaggaaatgagagatagaacaccttaagattgaaatcctgggggaatgataaagggagaagggagaagagcaatgaaagaatagagaaaaataagtttttatgtcatggaagtcaaaagaggagagaatttcagtaagaaggaagtgaccaacagcaatcactatttttttaatttttattttaccttgagttccgggatacatgtgcagaaacatggtttgttacataggtaaacgtgtgccatggtggtttaacagcaatcattattgatttgatatatgagtatcaaattctgttgagaattttagaagaatgaggatttgtcaatcggagcttgttgctaaggccagggctagatggcaagggcctgcactgtgaggatgttgatgaggaaatagtggtagagggatagaacactttctaaaggagcctggtagctgaggtagcaagtgactggggcaatcccttaatggagagagaccactgagggaagggtctttttttggaatagggagaacataattatgtttataaacagtgggaaagcaaccaggaaagaaagagaagggagaaggaaaataaaaacaaaaagaagaaacaaaaagggagaagaaacttttttttttttcccaatttgaaatagttttgctgaaagacttttttggtaggtgtattaatttcctagggctgctgctgctgctgtaacaaagtaccatcaactggttggcttcaaacagaaatgtattgtctcacacttctggaggctagaagtctaaaatcaaggtgttggcagggccttgatccctttgaaacctgtagggaatcttttttttgcctcttcctagcttctggtggtttgctggcagtcactggctcttttagatctaaaattctatgattctgtgactaatagacggtattattacagagttcatattcttaaagggaaacttacatacaagttttatgctttggctattagcctgcaagttggtgttttatatttatatcattatgtgaagacaatttaaagataattcggaatttgcaaaagatatagaaccaattaaaaatataaaatatgttctaaggctaacttttcagtttttaaaatcacaagcctcttcagaagaaattaaatttgattacatttaaaatcatgtgatttaacacagaaataaatatacatatgcaaatttttgtaccctgaaaaattattgrtattcatatgcctttatttttaatcaatagttattttctttgctattgcaatcagactcggaagaattaatacctgcaatttcattggcagtgcagatgagctctaaataataactttaagtttcaactgtggtgaatactattatttaacttaaatattgaactatgaggctgcgtaatagttgtatacttatgtcagctggttaaatatttaagttagactgttattattgaatattttatataacatctaatataaacttgatcattaaaaaggaccaaggcaataattaaatatatctttaaatatttatgactgccacttttttgtggctgattttataaattgtagcatattttctctcaagtatttttaatgtttagtttatatggcatctcagacaaatatttggtctagttttctattcactttcaaaacttttattgagcacttacttatgaacaacgtattctgctaagggctaaggatacaaatcaaatagaaaagggccttttaygtcaaagaattttgtaggctggagaggaagatgagacagatacataaacaattatagtacaatatgatatactgcactaaacgtctatataaagtgctatgagagaatagaagaagaaattaagaagacatgtaaagggaattatcatcaaagcagtgactttgagtcaggtattagtagaagagtaggagctcaaagaaagagcaagccccataatggcagcatctttatcttgcacactagtctgtctcttgtgcctgtaacaatgccaggaactttagtaactatttttttttgaattttgacaatcttggtcgacaagggtaaaaaaggacattccagaagcagaaaaacatgagcaaaagtatggagacatcaaaggtcatggcatatgttcgtttatcatggctggaatgaggggtatgaggaagatgactgagagtgtgtactttggagtcagtcagagcagagttgacttcattttatgctacctttatgattgtgggtaaaatgctgagcctgttttcctactttaaaatataattaatatttataatgttgctaaacaaattgcctggatgtagtgcctggtaaatggaaagcattaaattattaagcaattattacttttttttgagaaagtgatgtggcctaagactagaagggtacatatggttaaaatcctgaaggcctttgtgtcttattaaggagtttgaactaccttgtagatgattgagagctgttaaattttagtttgctactgaatattagctacaacatatatacaaggcactctgaagcggagatttaatagtttataaactgtatgttatccttttcataatattctgttacataagttcagcattcctcatcctgctcatattgcttaattatttgatgctcagtccaagtagggaatagtcagcattaatttattaactagtttaagcaaactgaccttcttcaagtctcctgagtttgagggatgggttaaatagcacataacaaaaaccccaaaatttgaaaaagaagaataaaataattaaattggaagctgttatttataggactgatatattaataaccaaaatataactataagtggcaagtgsatgatccattggttgataattgaaagctgattgcatttttataggtcatattccaaatctagctgacctaataaggtcttttaatagaccacatgttctagagttcatctgcctaccaaaaccttcttgcacaacgtcttacatatcatatactcacaattgtatttgttactaaatgctatatttcatatttctrttgataaagtcagtgttcactctgtytttaaaaatctctggaagggcttcgtcatttttttcttcaaaagggagaagagaatggaaaaataacgaatggatgtgttttgttatgagaaaactatttgctattgttaacattttcagggtagaaaaggacaagaatattacctctctttataatttcaggtgaaattaatactgcgaacctaaagtttttggttagtctatctttggcagttcagtctggttcgagaggtttctatagggagagaatgattatttttaaaggccttgatatgtcattttgaatcccaaagcagaaatcatgtagccctataaaccttaaatattagaagattactggctgtacagcaagcccccacagaatgcccattgaataaatggttttaatattcgagtcatggatgtaagatgaaatgtactaggagctgaaactcatgggagaagaatagtttgttaagaattggtaggaaatgggctactactaccaatgctttctagatcagcatttctccttctatgatgtgagcacactaactggattaactaactgaataactggattttggtgtttgtttaaaaggcagattcttgatccttcaccccaactttttgaattagaatctctagatgcccaggaatcttcatttaaatgacttccacagatgattctaatcaccacaaagattgagacccactgtctagaaaaataacgtagtaaaaagctgagatttaaaaaaataagacaaatgtaaaactgggtttctgattacggcagtttgtatcattggatacatctaaaataattcgtattgaaaaataacctttttaatttattttgttttatatttaaaactcttaagagtgacagcatgtggacagctaattaatacattatttcagtatcattcataaattgcttttgaatcctttgacttaaagagagatagttacacttttgactgtaattaacttggcatatgcctttgaattaagaactggagttctgaactttcttaaagagcttttaaaatggtgctgatgtcttttcattgttcctacttcactcagtggggcgcagatatttgtcataagtgaattggtgctaattaaagacagtattgctatccatctctatcaatgaaggtaactatatttttgagttagtaggagtagaaggatgggaagtgaaagaggtgatctgagatgctgcgaaatgaatgccagttgaatatgtagagaaattataattggtaggacttagtggtgattggtttgctaagggaacttttagggaaaatccccaaacaataccatatctttgtttctaaatataattcagttttatttcccttcctttttatgatctcacatcttatttactatggagaatttaatgattaccggaatgtgggaaatgtgtggcaatgtctaactgaatgttagtgtgtttaatggtaaaaatgtcaacatgataataatgccttgtataattcaatagaatataagaaattgggaaagttatctatgacaaatacttgatatgaaatctgagccacagtgggacaagtaaaaccctaggaagtttagtaaattcaagttaccaataacaattaacattratatgcttcatagttgttaaaaggtacattgttttttcttttataatctgtggttccattttattctttctcatgtttttatttttcctcatctagtttataaattggaatattttaatttgtttttgtttttgtttcaccatgtatcgtcttaattatagtttggccagaaattcccagagagcattgggatgttgcctagctattatgagatgaccagaacttcaaaaattttgttcagctgtataaattgtttattttggaaatttgtctagtttgttgtatggaagttatcatcttagatgtagagtcaactatgtgctgggtastgtttgagagaatggggagatagtgaacaaagcaaaatacctgctctcattaagtttatattctagtggtagtggtaggagagatattaaaaaacaacaaataagcaagtaaaatatattaaaaggtgatgagtgatatgaagcatggcaaaggtggtagggagtgctgaggtgaggagtttgctattttataaagtacaagatcatctcaacagataaggtgatatttaagttgacaccagaaagaagtggagaagcaaaccaagcagatatctggtggaagaccattctagaaagagagaaccagtatcctgacatagaggagtgaacttgatgaacttgaagaatagtaacagtaaggaggccacaatagctgtgtgatgtgatcaatgaggacaggcataatttaaaccattgtaaaggctttggcttttaccctgaggaagataggaaacctgaagaagatgggttctcagcagaaaggtgacatgagttctcagcagaaaagtgacatggtctgacttccgtgttaaaaggtttgctctggcaactgtgttgagtatagactatagcagggagactagttaggaggtgtctcagtcaacttgggctgctgaagcaaaatgccataaactgggtggcttataaacaacagaaatttatttttcacagttctggaggctgggaagttcaaaattaaggcactggctgatctgttgtctggtgagcgcccacttcctcacagatagccaatttctcactctgacctcacaargaggaaagggcaaggggtgtctcttgggagtttttatgagagcactaatcccattcaagagggctctgcctccatgatctaatcaactttgagaggtcccaccttctaatacaatcactttgaggatgaggatttcaacatatgaattttggggagacataatattcagactatagaaagaggcttttgcagtaatccagataaaagatgatggggtcttggatgaatgaatgagaaaatgaatgaatgaacaaccaaataaacatggattatatctgtctttctaaacaaatataataagaattgacctagttaggtaagtcttccctgaggaagtagggattgaaacgagatctgaaagaagagtaggcaatgacaaagtaaaagggctggggtcggggtaagcaatatgtaaaatgytttaggcaaaggaaagaatatatgcaaatttcctatggtggaaggaacatgtgttccaggaactggaagattgatagtgaggccaaagctcagagagccaacatttatgtgctaattatatcatgtgttttatttatttctcacaatagtctgaggtagtttctattgtttctattttatagttgagcaaattgaaaacataccgaagtgaagtgacttgcccaaggtcagattactaagacatagcagagcttgtttgtttattatagctaccttctaccctcaccagagtgcgggtagttcaatgaaggtggagaccttatttatttatttatttttaacttttacattcaagtgtacatgtttgttacatacgtaagcttgtgtcataggggttcattgtacagattattttattacccaggtattaagcctagtacttataagttatttttcctgatcctctcccttcttctaccctccaccctctgataggccccagtgtgtgttgttcccctctatgtgtccatgtgttttcatcatttagctcccacttacaagtgataacatgtggtatttggttttctgctcctgctttagtttgctaaggataatagtcttcagctttatccatgtccctgtgaagggtatgatctcattcttttttaaatgtctgcatagtattccatggtgtatatgtaccacatttcttttatccagtctatcattgatggcatttagggtgaatccttgtctttgctattgagaatagtgctgcaatgaacatacacttgcatgtgtctttataatagaacaatttatattcctctggatatgtactcagtaatgggattgctgggtcgaatggtatttctgtctttaggtctttgaggaattgtcacactgtcctccacaatggttgaactaatttacactctcacctacagtgtataagcattccgttttctccacaacttcgccaatatctgtaattttttgactttttaataatagtgattctgactggcctgagatggtatctcattgtggtttagatttgcatttctctaaagatcagtgacgttgaactttttttatatgattgttggctgcatttatgtcttacttttgaaaagtgcctgttcaaggagaaccactgctcaatgaaataaaagaggatacaaacaaatggaagaacattccatgctcatgtgtaggaagaattaatatcgtgaaaatggccatgccgcccaaggtaatttatagattcaatgccatccccatcaagctaccaatgactttcttcatagaaytggaaaaaactacattaaagctcatatggaaccaaaaaagagcctgcatttccaagtcaatcctaagccaaaagaacaaagctggaggcatcacactacctgacttcaaactatactacaaggctacagtaaccaaaacagcatggtactggtaccaaaacagggatatagatcaatggaacagagcagagccctcagaaataatgccacatatctacaactatctgatctatgacaaacctgacaaaaacaagaaatggggaaaggattccctatttaataaatggtgctgggaaaactggctagccatatatagaaagctgaaactggatcccttccttacaccttatataaaaattaattcaagatggattaaagacttaaatgttagacctaaaaccataaaaaccctagaagaaaacctaggcaatacattcaggacataggcatgggcaagaacttcgtgtctaaaacaccaaaagcaatggcaacaaaagccaaaattgacaaatgggatctagttaaactaaagagcttctgcacagcaaaagaaactaccatcagagtgaacaggcaacctacagaatgggagaaaatttttgcaacctactcatctgacaaagggctaatatccagaatctacaatgaactcaaacaaatttacaagaaaaaaacaaccccatcaaaaagtgggcgaaggatataaacagacacttctcaaaagaagacatttatgcagccaaaagacacatgtaaaaatgctcatcatcactggccgtcagagaaatgcatatcaaaaccacaatgagataccatctcacaccagttagaatggtgagcattaaaaagtcaggaaacaacaggtgctggagaggatgtggagaaataggaacacttttacactgttggtgggactgtaaactagttcaaccattgtggaagtcagtgtggcgattcctcagggatctagaactagaaataccatttgacctagccatcccattactgggtatatacccaaaggattataaatcatgctgctataaagacacatgcacacatatgtttattgcggcactattcacaatagcaaagtcttggaaccaactcaaatgtccaacaatgatagaatggattaagaaaatgtggcacatatacaccatggaatactatgcagccataaaaaatgatgagttcatgtcctttgtagggacatgtatgaagctggaaaccatcattctcagcaaactattgcaaggacaaaaaaccaaacacctcatgttctcactcataggtgggaattgaacaatgagaacacatggacacaggaaggggaacatcacacattgggcctgttgtggggtggggggagtggggagggatagcattaggagatatacctaatgttaaatgacgagttaatgggtgcggcacaccaacagggcacatgtatacatatgtaacaaacctgcacattgtgcacatgtaccctaaaacttaaagtataattaaaaaaaaaaaaagaaaagtgcatggtcatgtccgttgcacactttttagtggggttgtttgttttttcttgtaaatttaagctccttatggatgctggatattagatctttgttggatgtatagtttccaaaaattttttcccattctttaggttgcttctttgctttgttgatagcttcttttactgtgcagaagctttttagtttaattagatcccatttgtcaatttttgcttttgttgcaattgcttctggtgtcttagtcatgaaatctttgcctatgcttatgtcctgaatggtattgcctaggttgtcttccaggatttctataattttgggttttacctttaagtctttaatctgtcttgaattaatttttgtatatggtgtaaagaagggatccagtttttttttttttttttttttttgagacggagtctcgctctgtcgcccaggctggagtgcagtggcgggatctcggctcactgcaagctccgcctyccgggttcacgccattctcctgcctcagcctcccaagtagctgggactacaggcgcccgccactacgcccggctaattttttgtatttttagtagagacggggtttcaccgttttagccgggatggtctcgatctcctgacctcgtgatccgcccgcctcggcctcccaaaatgctgggattacaggcgtgagccaccgcgcccggccagaagggatccagttttaatcttctgcgtatggctagccagttatgccagcaccatttattgaatacggaatcctttccccattgcttgtttttgtcacgtttgtcaatgatcagatagttgtaggtgtgtggtcttatttctagtttctctattttgttccattggtctatgtgtctgtttttgtgccagtaccatgctgttttggttaccgtagccctgtagtatagtttgaagatgggtagcatgatactttcagctttattctttttgcttaggattgctctggctattcaggcacttttttttttattccatatgaattttaaaatagtggtttttttttttttttttttttttttttttgagatggagtctcactctgtccctcaggctggagtgcagtggcgcaatctcagctcactgcaagctctgcctcccgggttcacaccattatcctgcctcagcctcccgagcagctgggattacaggcgcccaccaccacgcctggctaattttttgtatttttagtagagacggggtttcaccatgttagccaggatgttttccatctcctgacctcgtgatccacccatctcggcctcccaaagtgctgggattacaggtgagagccactgcgcccagccttaaaatagtttttttttttctagttctgtaaaaaatctcaatggtagtttactaggaatagcattgaatctataaattgctttggacagtatagccatttcagtaatattcattcttcctatccatgatcatggaatgtttttccatttatatgtgtcatctctgatttctgtgagcagtggtttgtagttctccttgtagagatctttcaccttcctagttagctgttttcctgttctattgtttttgtggcaattgtgaataggagtttgttcctgatttggatctcggcttgactgttgttggtgtataagaatgctagtgttttttgcacatggattttgtatcctaagactttgctgaagttgtttatcagcctaagaagcttttgggctaagacaatgggtttttttctagatgtaggatcatgttgtctgtaaacagggatagtttgacttcctctcttcctatttggatgaccttgatttctttttcttgcctgattgccctggccaggacttccaatactacgctgaataggagtggtaagagaaggcatccttgcagagaccttattttgtttgaagctgtatcctcagcaactagaacagtgcctagcacatgttagatgttcactaaatatttgctgaatgaataaatgagagaatgaattggaatcaaggtgtatttacctccagagtccatgttcttaaccacatcttgcataaccagatgcaaattagagctgtcagactgtttcttagaaaatgctttgataaggggccaaagcattgggccagtccaaagggaatgaagaaaaagaaatgctaaaggggaactagcattcagaaagaataagtggctcaatataaatttgctataaactagaaaagataagaagggaggaggaaaagaagcctctggttctaaagttgagtggctaacttccatagtagctttcactagaacctgggcctggaagttttttttctttgctatcccacagctgcccgttgttttgacttagccactttgtttcctgggaaggagaacagtcaatgtatctttctgatgtcctttaattcattcactcaccaactccccttcctcaaatatttttcttattgggcactttcagataatttgtccccagagccatatggcttgtgggacacacaaaatatctcttgagttactggttcagagttggtagttcaggtgtgtaactttatgcctatctatagatatttctctttgaaatggaactttgtgtatctcacatctaggaattccatccatagtcttttctgtttcttcacctcacattgcttcatgttcttttgccacttaaarctatcttttctcttttttctcagaggaagaaatgttccatctctgttcagaaggtgacatcaccacttgtgcctttttacttccattccctctacagaggattccctctcttagtttgcatggtgttggagattcaggatccattttctattttgccactttctggctttgggaagtagaacgagttacttgccttttttgagtctcagtttgttatcttaaaataccatttgtcttgctaaccttgcaagtttgtagagagtcagttacaatagtgtatatgaatccactttgtaagctagaaaacaccatttaatgcaagatgctattattacaacctatgtgcacaaataattcagatttcttcttaaaatagttttcctcgactttggtaacccttgaaatatccttatttccttcttccttttaccgtcaaacctcttgaaagaatagtctttattttctatctgtatctccttattcctctgtctattggcatctggcttctatttcattctgggtaactgtattgaatgtgctgccttccagattactagagattgcctaattccatatttaatgtctttttctcaggcctcactcttctcactttctgtagtaattaatacggttgactaaaatggctcatcacagcacttaacacatagtaggtattcaacaagtttttagcacataaatgttcctttttagcctttttagattaatctacttttttctgcttataaaacaaatgtgtgcatctctaagtttagttctttctatgctgttttcactctgtactttctaggaggtctgatttaytctattgccttttaactctacatggatggatctcatgtctacttttccaggtctgtcctcagccttagttctgcctgtttaactctatatttttacctsgatgtctcattgtcacttcaaattcagcaagtttaccatttctttcccctaagtcaatctccttttcagccttttttatttttgacagggatgcaagcagttagtcaccagacttgagactttagaaaggtgttgactcctttttctttatgtattattgcagtggtcactcatttgttcatcagatgtttattcagtatttgttacacataaagcactattctagatggtaggaatattgaagtgaaacaaaacagacaaaaataacgtcacaaggatcttattttctcatcatttgcatttattaatccatttattcaataaatatttattgagagtgatggcggtacaatttttttatagggttgtcagagaaggcttctctgatacagaaagatttgaagagacacctgaacaaagtgagagagcaggtcatgcaaagtactggaagaagagctcccaggcaaagggaaaaatgtatagaaaggccttgaagagtgaggagcttgtctgttcaaagaaaagctggcaccaatagagtgatgagagtcaaatgggtgaataaaagggaatttggagataacattagaaagatagctggtagccaggttaggtagttcctcaaaagaatgatgaagactctgggttttctctaagtgagataggaagccactggaggattggagaagcaaactgatataatttacatttaaaaataatctgatattagaagaatagactatagaagagcagttgttgaagcagaaacaccagttaggagactaatataaaggtgtttatatgagagatgatgatggcttggactagagtcgtagcagcagaaaatggtacatactatgaatacataaattagaaaaaaaataaaggttttttgagtagatgtcacttcctctattagcatggctttgtgagttggcaaaatttttccttggagktgccttttccttagatgtttacagccctgtgcagggtgcatgatttagtgagcagtgctggctaggtttgcagcctacttgctccttcagctgggcacccttgtgcagtgaataaagtgtataatggtacacaaccatttggatagaggtgaagggagtgcgaattaactcttaaaaaatgtttttattcccattattctcaaaaggcccttatcacttcccatatatttaatctctccaggtagactataaggccactgaggaccagaactgtgtcttattctttgcttcagtagtacctgacatggtgtcctatctgtagtctgaggtttgttgatggtgaataatgaaactattttatgtcaatcctttgcacagatcattttactaaagttcctgaggtctaaaatagttctgcatgttaataaaatataattatagcagcttatatccattgttaagagacataaactgtcaaatgtaaaggccattagtgtgacttatataaaagtggatgtctttttttcctgtcatgtagtattagttgccatctgaaagactatttcaatgtacccaggcttattttaatagctcataccaactgcaaggaaagtgataaaatattttatttttttcgtatgtccttatttcagtaatgcagcagtatcttgaaatgacatggtatggatgaagcacgcctagggactgctgccaagtcctacayagcagcagcatggaagtagttgagtcagtttcaccaaaagtttgaaatctattgtgttagaggcatgtgcaaaagctgtgttaattgctagcttattttccaaatggttctgttttaatgaagcatatttaatgcagatggttggaaagtaagttgggcaatgrctaaactgactctaacagtaaactgattcttacagtgctttcactccaatacttaacagtgcctttgtaaagttccttcattcacagtttttacttgaaatgtgacctaagataactaaaaactattctttctttaaactcaatctctgaaaagaacaagaacagtcatagttcctaattgaagtcaaaacaaatcaagtcaaagatagtgcagcttgttttcttttgtacaatatcattgaattctcttcatcattactacggctatttctgaagatgtttaattgagataatgggcattataaagggttacatacaggaactgaaatgactttaccaaatgctgaagttggctttgttcacacgacaataattttacctcttcaggggtatgaaatagaacagtctagaatattaatatttcttatttgcacattttctatattttatgcattaaaatcggacttactagatgttaacattaagttagaaatgaaatcaaggataaattgtccagcaatactgtaaaatctttttatttcattttttctatgagactcaaatatcaatatatagtcattgtgtttrtcttcaatcttttgagagttcagatatgttatcttgcttaacaatgatgtgctgatttcttctaagtattttattttggtgtattttggtgtacttataaatatgtacaattgtcttcatatttgctcgagaataaggatactgtccctgttagactccaggttgagttctgagaggaaaaagggaaacatggttcaaagggtttgtatcaattttgccattttttttctcacattgtcactaaagtattctcttcgttatctgaataagacatctgctaactagtttggccctttttacctgattgtttaagaagtcttagctaaatgttaggccttggaggcccaggaatctgctamatgctgctgagcttgaaagacataatgtccttggtctgttttgtctcttccactcttggatatctttgataaataaccccgatgtaaatgtgggatraatcaagcaatggtgtattctaagcagtgactggcccaaaggatgagttacatcttaataagcaatagacttttctcatattcaaaagaggttgaagaatacaatacaaaaattaagttttcacccaacttagttatataaatatggggagtcctaacactgaagaaaaaaatacgttttaaaaaactagtttgtgagaaatcttctagaataacaatcctactttttatctctctctagtagtctttccctagaggaggttaacgttagatcagaaagttctctgcccagatgtatttggggagttgtattgaacatatccctttgccacagaaactagtcatctttaaatgtcagcttcaatgttgaaattttatgagaatggaaaggaatacacatttttacttattttagacctccctttggaaaatgtagtcggctgctgttgtctcaagttggaagggtttacaatgttttcttcaaatattcatctcaaatactcatggaaagcaaatgcaatccagaattagacaagaagaataaatgtaccttccctttaaaaaacttattaattgtagcacatcagtcttagtcatttttttgacctttctctcaatttatatttaccctggatacttttcttttgtcttgtttattttaagcatggcttaatttttcactggagcaagagcttaaaaacgtcagagtaagaagagaacaattacatttgtgacarttatcaattacttgaacattattcaagatagaatatattttccaattaatgttaaaaacagaattgtagaattacttttgagtttgattcactttgagaaatctaagaaaaaatttaaaaatccattctgtcaccttttcccccgtcatgtagggatgttcttaaagtcaaagagagttgctgtttggaatactctctgactttgaagcctgtggaaaaccacttatgaggtacagggagccttatgttgagttaggcagctggagatgaactattgccatggtgctaatagtaagtatgggagggactctgaaaatgaggtttaaaatatcaggttgccccgagtaacagtttatggataggaaaaatccggctatattattcatcattattatctatatgtcattgtaatctagatgtcatgtatttttcatcattattatctagaagtcaggtatttgggagggtgtttctctgtaagaaattgcaaaaacaatgtttttattttagagaaaataagatattttgcattttttttttatttttaaaatttctcactatggttttcaggtctaatccttgaactgtatctcttttggtcttgattttgttttcaaagaaatagcagagctaagcttttcatttaattgtaataaaatactgccctaaaggagaaagaaatatgatttttttactagtttatatggaaaagcatataactgtaataatattttaactatagtttgtatagaccatactcatttaaactctatgcaaatctttgttactttagggcaaagaagctacaaaaccataatgtgtggtgtagtgagcacacaccataaatttgataatcatacttgtgaattcatcatattttatacaggagatcgttgtagcattatgaayagtaatgtgcaaatggcatgaaaaaaatgttgccacactcttaaatctgtgccaagttgcattgattgataagtgaagatattaaaatagcagaaattttgcattgactttaatgcatggagtttccataattcccaatgaatctggaatgttaatataaatactctttttgtgaggcggcaggaaacatgctgcccagactacacatgttacccagctaggactgcctctactgttcagagaaataggagtgggaggctgtcttaagtgaaagtgaaaaaaggcatttgtttagctgcatggcaacacaaatatttcgcttagtgagactgacaatgcatctcattatgtgaacgggtgccagcttgtaaaaaatttctgtttaactttccatattagttaaaggtgcccatgcttaactgtttgaagcctgccaatcaggttccctccctctccctggcccccctcccactccctgttgttgcccccaactttttgtctaccactgttttttcccacagtaatagatgagagagctaaggatagctggtccattgaatgctgttaggaatatgtggggaactctgccagattgaagtcggcctcgagctagacatttgttacttcttcccatttctcttattccagatgcactttttttaaggctaattgttatattctgccttgacagtagaaacattcaatggtattgtttcaagttgacagttccctgtagtactaccattgtctgagtaccagtcccatgttctcaggataaaaaatccttgatcttaaattctccaatctcttgcaatgcatttggatcctaggctgttttcctttttatagtgatagaaagcagargaaaatgaactaatgatgattaccatatcacttttaaaaaattagttattttacgaatttcaaaataccttgtacttcaggagtactttagatcaaggtctctatgtttgaattgccatgattcctgcattgtatgcaatttcagtagttttatcaggatatagtactgtaaggtgaaggcaaaacacatttttaaatgtctgtgattataatatacaactgaaagattcttaccattcataatgcatagaatgatgtacaaggacccacctagatgagtagtcgaggaaacgtacatttttaaataatttcatcatattttttaaaagctgtagcatcaggaatattagcgtttgtttaaatatttcaaaatggcttacccagtgagagagtgttggttacagaatgaactcagagaaataatttatagtagacaaagcactttaaaattatataaacaaagagttaaaactaggcatcactttgcatgaagaaattgaaaacaaattcaaatagtaattgttttgcaccaatatctgcataaggtttaagcaattgtgttccatggttatatgtatatttgttttataaaaatagttggggcattcaacttttaaaaaataagatgtatattcaggtatgagaattagaagcctattctcaaactgatttttttttccaaattaagttgctggaatattgcagtaaaatattttccttttcttacttcccactgccgcattctggttcttatcctattgcatctctgtctatttttagatggatgttggtcctcttggaaaagagaatcctcctaaatccagaagactatggcatcatctgtcaggcagaagcctgaactggctgaggggttgtaaatgcctgccctgccaaggatctttctgacttctttagcaccttattaccccaatcacagtcgtgaatttttgctgaattagtggcattctggccctgtgtctgagcctttcaaagagaaaacacaatatgctgtccattgataggatgggccaggggtatggatggttaggaggcaatgcagttacagtctggatggaacccaaagtaaatgtgttgccattagcattcttgttaattagatactcatggtaagcctcaaagtgccaatatatgaatttttaaaaaaagcacatttggattttcctgtgctgtgtattattgcttagttcttcctcaacaaaagcaactcatttcctctcttcaagcaggacaatacttccactttctcaccaaggctggctggttagtgtagctaaattcgtccagtatgaaaggacatcaaatttacatggggagttctgactccatttcacgcttcagtgtgaaaggtagaaggaaggtattgttctatggaatacttctgtctccatgtcttccatcttgcccatccaattactagytgacatttaaagtatttggtagtggctttatgggacactattgtgatattctgtcaagatttcatagtccccaaagtggaaaaatacctctggtttcttgtcaattacagttcctagcagatagtaagcacctaataaatatttgttgaatgaataattgagtgaatttgtgaaagtataggaaatgttaagaagagaagaatataaagttcttgaaaaatgctgctgagaatgatttagtgtcgtggatgcttaaagtccaaattctgagattagctggcaacctgttgaaatgaagactccttaatttaaataatttggggcagattttcagactttactttttagctggtacaaattagccattatttgtttccaagaattgtcaggtagtattcagttttccaaatctggtattttagaaggtagtggaatcytctaaaatgtcatacttggaagactgcctacaattcagaataaataatttttatagttccagagagactagagacttcttggaaaattctgtgcctatctgttgttttatattttccttgctaaagaataatgctggaagcatgatgctcaccagtaggaaaaattggcatttcagtctacagggagcttggcaaaagtctttttctgaacatgcttttctttctrttaaagtttgattgtgaatcatgtgggtctaaatgtgaaggtgtatttttccagctgaccatggtacatrtgacaagcagactgtctctagtgctctattagcctactgtggtgctaatgccttacgaggtgagcaccatgatcatgttcattgtacggagaggtaggcaacagagtaagtgtatactctttaaagagctacatattgggaccaatcccttgtgaagtcatgtgtgctaaactttatgctgaatatttaaaatcaaaggactatctagaatcccaaatcccaccagtgttcctcataactttactcttttaatctaggaatcgatacactcaggaggcatttttttcttcaagattctctttactgttattttcctcaatgacatgccatttagattgccagataatctagaagtttgctagtatccctcgtgattgatcatttattctgcctgtgtattccatggtgttctttgtgcatataatttttaattaagacataataattgtacatatttatggggtacagagtgatatttcaatatcggtatacaatatgtaatgatcaaatcagggtaattagcatatccatcacctcaaatatttatcatttttgttttgagaacattcaaaatcatgctgtcttctagctacttgaaaatactcagtaaattgttaactatagtcaccttcaatgctgtagaaaactagattctcctatgtagtattctatagaaattcctcctatctagctgtaattttgtatcttttaaccaacttctccctgtttttctccctgttacctttcctatcctctagtagttactattctactctactgctatgaaatcagctttttttttttaagcatccatataagaatgagaatatgtagtatttatctttctgtgcctggcttatttcactaaacaaatagttatattttatttttggtaacaaaagtctttgtaggggcctagatatttttatttacatgccaaattaagcaggtaatttacatgtctaggctgtcaaacattcaaacgtacttcccattacatgtgggaggcttacttcatattttcttactcatttgcaaaataaaaatattgaaaaaagaacatgtatcttgggtaccttctgcatataatgcccaatacagatgtatttgaagagttccattattcatacattgtgaatataatgactagcaaagtattctagcatacattatttatagctctcagaatcttctaatattgaataacaatgcattaaaatatagaatattacaaaatagcttatatttatattatcctctcatccaaaattctatagatattttggaactgactgacatagaagcagtttgtattttcttgatatatttcatgtagtttcttgtacctggaatacttctgttaaacatatttacttgtaggaatttcatccatctttcaaggcctagctacttgtagtcttctgtgatctcgcctctgtgatctgaactcccatagcattttgtctctctctttttgttcttgtcacaatttatctttttagtaatttttgtgaacagtccttttattaatactagtttctgatggaaagttttgtgtttttttttaaacttgcaggggtattaagtataatccatcttactacatgaccatayataatgcccattattcagtaggcactcagtttataattactgagggaattaattaaaaattctgcaaatttccatattcccaattcttttcataatttaccaaatttgcattgcttttcttacatttagcttttcttatatgtgctgccagcttttactattttcatgttatcctgagagttaggtaaaaagtagtttcttgaatttgcagatgrgttaaatgaaacgtttctgaagaayatgaagtgtattatttatcctgcgacctgaacaaaatctggagcttttggtgggggaaaacaaaaagaaggaattggcacatcactctcattatcactgctcatgcttcttctctcccactgccagttatgattttggaggagtggggactatgacatgtttctttgtatcatctctagcacaatagtttgctcattgtcagtgctctaaatgtatgcataaaatgaatgtgtgaatgaatttgacataaatgaatattgtttttggtacctcagccattctttcctttaatcgctttccagtttccccaggcttcttttgcatttatgttctcmttccagtccctcatataaaaccctcctttcaggaaagaattgggtgagcatactcaacccaagatattaatggccaaaaaatgttagacttttgtggtatacgcatttaaaagtgtagaactcggccgggcgcggtggctcatgcctgtaatcccatcactttggaggctgaggtgggcggatcacctgaggtcaggagtttgagaccagcctggagaacatggtgaaaccccgtctccactaaaaatacaaaaatttgctggacatggtggcaggtgcctgtaatcccagctacttgggaggctgaggctggagaatcgcttgaacccaggatgcagaggttgcagtgagccgagatcacgccactgcactccagcctgggcgacaagagtgaaactccatctaaaaaaaaaaaaaaaaaaaaaaaaaagtagaagtcttttcagatacaaattaaactaaatgaattaagttatatgggatcctcattccctcattcatgtttatagtggcctttaagcagtttttatattacttgaggatccatcaaaataaatttttagagatgggtagctagggctctgtaaatctttgcaagagttctaagaatttagacttaaaggggatgatggaatgattacttggggtagctgtctctgaagtaagagaagggacaaaagttatcgaatgaagaatacttttattctcatttgtcttaagaattgctagattcgtgttttttgtcccccttttgggactactagaaacaatgcaaagaagtttttgctgtgcaackgctattaaatgaagtttgcaattgtttttatatttttcctctgaagttacctcackgtaataattactgtcaaaagaaactcttttgctgtttactgttttcactatgcagcatttgttctggttttcttttggggaacaacccttctttcacttttggtacctgtggttgaggtggaactgcctttttcctcccacgtcatagggagtgggcatttcatactcctggcaacagtgattggttcagaaataaacatgctatccaagccaggccagtgagactcaatcctgggatatttcctggaattactgggaaggaaacactgtctttctactgaggtttctaaccttgagcttctgatagtcatctttgccactgaaaggggagagcctgcctgagagagagaaggagaaaaaccaatttcctaattataccatttaagtactgagtccaggtgtgttagaaggcaggacttttcaattaagtgaaccaataaattattttttgtttgcctgttggtttacttttttatttgttagagatgggggtctcatagtattgcccaggctgatctcaagtcatccaggcttaagtgaccctcctgccttagcctcctgagtagctgggactgcaggtgcctgccatagtgcccaaccgacaaattatttttttaataaaaaaagctactttgagttggttttttatcacttacccaactgagtgttgtaatgcatacagccaaagttgcataactgcacaactgttatggtggatgcatatatggatatatctgatttggagaaatattttaatgtccattgtctcacctaatatttgcgatttattctagtttacttttcatgagcataaaggagtatgggttttatgatgaaatgtgttacagtttaaacaaatatagttttagctgaaataatgttattagcattgtcaaagaataaaatgcaaatgagatgatataaatagataaaatccagacttttagtttatattattttgaaaatagaataaatttatagaatttctatatctagctttctgtgtgtagttttcctttttcataaatgaaagaagttgaaatttgcttatatttttgatattcacttatttatagcaatttgatacttttattagatacacaagttcaacaggaattggacagagtactttatctgcttatgtctgaagaaatattctctgcttgtgacattttcatatgttaatccttttcattaatgtataattgttaatagatttgcttcaaattaaagctctcactagtttagaaaacaaaacaaaaatgaatattgtagtacaaattttgcattcacctagaaaacataatctggatttgaaagaaaatttattctccaaatatagctatgcaaattctgcttgactttggtaagtcactgttaaagaagtaatgtttttaatttatatttcttgctcttttaggaggtctgcattttgtttgtgtttttatattgaaatatgcatgtaaagactaggttgatagtttaatcatctctcttaagcacaggctggaccattttgtagtaaatgtacttaaaaatcccaacattaaaataatatcctgttttttttaatccatgaaattaaaagatgtgtattctcaataaaatttggtcttttttacctggcaaaccttaagtgccaaggtcttaagttggcagttttttccctagcccttatagatatgtctcacatttataagagcctcagatttaagtcccttgggtgttgatactttcattaggaaaagattggggtgctaactagtttatgagagtaagggcctcattagaacaattttaaaatcaagccaaaactgaaaaagccaattaacctttgaaagtcctcgcagacaacagcacatttggaatagcatgcacacttagttatacaggtggagtttctcagaggtagtagattttacagttttactatcagtcattatgtagaatttcccctttcttcagatgaccccaaatttgcaaccaagaccaaatacaatttaaaatggataaaattcctcctaggaagagccttctctgacactacgcctttcctgttcctttaacccttctatgtgtgatttttctttttctttttttttttttcagtcactcactatctcccctaccctaagttgttcataggatagtatcacatagtagtcatatgcacccttattattatttttggttaaaagttatgttaaaacaataagaaaaaagataaaacctctcatacacttccacagtatatcatctgttttcatttttacctgcttatttccagtccttgttcatacttgttcatatcttttttttttttttttttttggagaccggttcttgctctgttgcccaggctagagtgcagtggcatgatcatgactcactgcagtctcgacctcccaggcccaagtgattctccaatctcagctccctcaagtagctgggattagaggcgcacaccaccatgcctggctaattttgtttgttttttgtagagatgaggtttcacttcattacacaggctagtgtcgaactcctgggctcaagcaatcttcccaccttggtctcccaaagtgctggtgttataggcgtgagccatcatgcctggccccttgctcatatcttttaaaaacgaatttaatgtaactgcaattagatcatagatgtcattgcrtgttctttgtttcttacttaatgttaaataataaatatttcccaccacaaagagcctgtcatgacctacacaaacacttagggaagccctggtgtgtcttatgtcttttgggtcagaactgctatttggacattactttattttattattttatttttaaaaactcatttaagatttagaaacttttaaaatttctttatttagtttttgggtaaattataattatatgtatttatgggatacactgggatatgatatatgtatgcatgtgaaatgtatacatgtggaatggtagaatcaaactaacatatccatcaccttaaatacttaccatgtgttcctcctgcctaattgcaactttgtaccctttaaccaacatctccctattcctccccatccccacccaacctctggtaaccacctactgctctccgcttctattgagttcagttgttttagattscacatataagggagaacatgtggtttttggttttctatatatttgggccttattttagatagtcttcctcttggccttgagttattctattgaaaattagmctgaagctttttttttttaaaccgaggaaagacattgtttctgtctgtgatggcaatgcatcctaaattttaccaataactatatagtttttggtaggttttgtcttctatccattgcatctgttgggatgcttatagagttattcttctttaatctgtgaatatggtattattggtagattttctgaaccatttaggataaccgtgacaaaacttatttgttctcagtggattttcatttacactatagaattagttaaaatttaaaggatatttgtaactgtgttcatgattagtcagtgattttctcttcttctagtgtgtctattttattttggaatcaaggatagatattctagccttataaaatgcattcagagtcatatatatcttagtgtggaaggaactcatgatattacctctsctagaggcatttgcaatcaatttatgttaaagctgttaactgggaggaaaaatatttttatctttaaagaattttgaaacataaacccaacatagctgttttcccccaatcctctgcctgttttttttttttttttggaggggggttaggggactgcaagaggaaagttagggatagagaaaatgttggtaaagaatggaggttgtcgccataaggctctgtcatagcaatgaaattattttggtgattatctttcactactttttggcaggcctatggtttaatccattggaattcagaagatagcaggttgatggcattggttagggaagatattgatcatcagagaaggtgttaaatgaacagagaaaaagcctcttgcaccaaagttgaaggtgatctgaggtctaaatactttagtctgtttatgtaccacatgtcctttataaaggcaaaagggtagaacttctccttcaggtcccacaattaccccattggttacattgagccatttatgacatcattcttcttgtgagtctttccttggggttagttttagtcatatttttatctctataaaacatcaggctgggaggtggtgtgtgcctgtagtctcaactgctagggagcctgaggcaggaagactccttgagcacaggagttcaaggccagcctgtgcaacatagtgagaccctatcactctggaaaaaaaaaaaaaatctgcggaggtaggtgtggcttcacatgtaatttgacccatgtttcatctcatttcatcctgtaaaaaatagtttaaaacaaatgttagaaactcctaacttggggcttcctaaatatctgatgtgactggtgatgtaatttaagagagtatgcttacttttttctgtccttgtctgttcttctaattgtatgataattttaatcaacacagcttttaagcacatactatgtaccagatgagakatatgtatgcatgtgaaatatatatgtgtgaaatgatagaatcaggtgaatggatatgtagagacaatgttcttaaggagttcgagctttccttttccgtctttgttctttatggtcctttccttttctgatatgcaagcacttttgtttctctttgcctctctgtcaaagcaaagagagttttaaaagaaattttgagttgaacgtaagctgcttcctttcagaagagttagtacagctctctgaacatggacttagtgtttgtttagaatgcagtattaacgagggcacaagccttgatttttctatggacctattagctttgctcttttccatgaccttgaatcactgctgtaataattgatacttgctaaagaccaggtgagaggagttggttgatcaaaacactagaaaaataggacaaattgcattcttgcctgttattcttatttataaaaggcaaaccatcactcagggctttactttaaaacaaaattattattaaaataagttgtaaaggaatgtggaaaaaatgaaaagggaataaaaatgattttattatgttatttatttttttcctttctgtattagttaggtaattcttaagaatgtcttctccatgtcatttagtttcctttttaatatctttggatgcaagattgagctttgctggcctttatttcttgttcctcgggtgttagtgctagctttggcaacctcattgtcagggctggctcaaatgaaggaatgggtgaaggctccttttggagacccacttcactggttattttaattgctcagagggataattgttgagtggtgctataggatagtatttcccttgccacaagggttaggaattctgcccggtaatcactcctattcctgctggatgtgtgtctgtgagtggaaagactggtaactggcttgagatatatccctaaagctacatgtagggactctgttagattaactttgggaaactgatgcaatcatcgtggatactttcctcattcatcttttgtagaaacagaatatttgcaaagcttaaaattagcttcttaataatcttattctagggcactttctcatgtagtgtcctcagaccaattttctttgtatgtttttcgcagacaaagctcttggaggaagcatagagatgtgatagggmttggacttcaaaagaatttttagttttaaacactgctattgtggctatatctgctgttgtaaaggggtgtgaaatactgttttctggtattctgtggaataaaactgtctgtactttctaagatatagtaatgaacaaaattctgagtctagtagccattagatagctcctcaaacttagctgcttctgtcagtggaagggaagcatctgagacaaaaaagtttgtagttttgaaaccttattaaggtataactgattcacaataattcagtacacaaaaatgtgaacttgtataggtcacattttaggatcagcttaatagctgtaatttttaaattggaagtcaatggagataaggtgtgatggggttgttaattatctttttaagaatttttctcacttattaaaataaaatgacatcaattttgagtggctatgtagacagcattagttaaaatggaacaaaacagaagcttctgctgatgaactttgggagtcatcaaatgaccttgacctctttgctaagactgaatactttaaagaacccagttcttctttatccttccttctatttatgacctttgccataaaacttttcagtgcccttccaatattgatagggcatttgtcctcacgactagactctgagatcagtcatttagcttacgttggccaatgggatgttagcttatgtgacacaggtagaggcttgtaaaagtacttgtacatttctgttcacactcttgctgttttctgtcactatagaagaacaatcctggactagcctgttggaggatgagacatatggagcagagttgaattataccagttgtcccagccaaggccaaccacaagatatgttagtraactcaactaaaaccagagaaatgtccagctgacctacagatgcataagctaaatacatgcttattgttttaagccactaagttttggggtggttaaacctgtagcattcttgtggctgtatatagttgatacaacctcaaataatcctccttttcaaacaagtccacaggacagatggcactgatgatcctcagtgatttcttgttccaatgacaatatttcctgttggtttcaagaaatttctagagcaagctactcaggagtatttgtgtgagacttaaagtggattatgtttcctctgtgcggaattctagagatattttctatctagtccatatattaacctaaagtatagtagtagccttatggggcacagaacgatttagtccataaagaaagataragcaraaaatacctacaagtaggcaagtaattgaggtaagttcatacagtaggaaatgcaaaggacaatataccctttgtcgagagcaattttgactaaggagaagtagcagtgggtggagtcagtaaacagaaggcaaaaacaacatttagaaaaaggaaactcgatttacgtttgagctggttaaagacaacatggtgtaaaaatcagtgctatgaacaaagactgagctttcaaaccttaactccatttatactctgcaagctcaacttattaaagaggcagaggggagagggataggatggggaaggttggatgaaaagaggcaaagagttggttttgttggggcatggttctttaattcattgtgctttgcagtcaaatgactgttgccttttctaacttcagactgtatatagtattgctatttcatttactctcttttgtaatagaattctgccttttagtggttatataaaaagtagctggctgagagtgttctggacagaagtagggccttactgaacacatccaaacagtcacgtccctccattcatctgaagctgtattcggagaaggggtgttagatgggggacctgtacttggttaattcatcatattacttggaaaggtccttattattgtgcacagcagtgtggtcacctggcggtaggtcattagcatttagtcttcttttcctcaccacaatgtacaacatgctaattaggatattctgaaagctaagtaacctgttttaaaaatcagacattttaatttgcagctttaatggctgtttttataataactggctttattgggggtaaaagcacttctcatgttccactagcaaggcagagtataacagaagctgacaaaattaaaaacctcataatgcgacctttgcctgggataaaaggctgtttcataacaatttccttttgttctttgtttaagccattactctaaaaggagcctccgattaatctaagtaaatgcatcattacagtactaatccgtgtccttctgtcagtgtctgttttaattaaataagaaatgctagcagaaagatatcacgcacaaagctgtgattggagaaagaagcactggttgatcaaggaaaagattaaaaagagctttagtgttttgtccatttgcataattctagatgccacagagtttcaggttgaaaagaaaacttacaaaagagtttaaaacatttcattcttacagatttaaaataacgggatttaccaatgaaattctaatcatcccatttatcacattaaacattccacagcaaggagcagaacggcttggggtgtgtcttttaaaccttttatgcaatattgtcttgtatctctgaaaacatacctgtcaaattttcatgtgtttcttcttattttaggtaaagttgatggtgaaacctggttgtgggcatacaatgtgatttatttttcctttttaaagtatcttgcaacttttagtttagttttgcttttttaaaaaatggctttctattgataacatgttaagaatttaggtgcttaattggttgttaacaataaaagtatatttaataaatgcttatgaaatgaatattgttacattgatacacagaaactcttcttagcagtagtgttgcagaattcccgtggtgagggctttcttaatataccggccattatttgatgtaatgaaaagagaaagtgtgcaacagtgagattgttaattaatttagcctaacaagatgaagataaatgaagcaaagcacagtttgaatgaagcragaggtcttatttacaatttaatacatttttatataatgcagatttcacttggtaaaaaacaaacagaccctcaccccaaatacccactaacagcaaaagtacgtcccttccccacaattcaacactaaaatcttggtttgactttacagaaaacatgtactgtggccccatatggaagacacttttacagtgtgtaaacagtgcttttctacagctaagaatcctacactagttaacctttaacttcagtattttgttattctcaatatagactggggatgaccataagaataattatctagaaacctttgggtttcttgttctccaggttatcctgagacatcttgctttagttatttaataataattttattttaattcttttttttttaaccaaagaagttcaaaagtgggaaaggaaaaaacaagctgtgtgcctttttacatgtgcttgaatctttagcaattgtacagaattcttaaattagcattattttttaaagtctccctttcagtgattaatgagctttatccagtatttgaccttttatcattcttgttttctgctcagaagtacttccttccttcctactgtagttagaaaagactgtctcttatcttatgttactgtaggcagtggtaacagggctctctacaaatggtgttattatggtcactatgtttttatctcaggggtcacgaacaaatccatgcaactgcttctaaggatttcaataaataggactttttatccagacaatcgccttttatgttacttttaaacaaaactactagtccatcaagagtttcaaaagaaaacaattctacagagtgccggtatggccgcacagaccaatcatcatggcacccattctccagtcctttatttttcaagtccacaacaataggttgttgattcaatggacaagaccagaacaattaagttctctgtttagcagcagtgcagcattttaatgcccttctctaataatggtctcattattgttattctaagactgggcctcaggaggaggaatatttgctggaggtacgtcattattttgcaaatttcgattagctcatcatgttgtctgtagtgtgaaaatcgtagctaattagggcagcsagttagactaccagcttttgagcttatgagttaaaaggtagcatacttgataggccagtgatgtgaaaaaggtggtaaaaaggaggattagagcagttgccttagtaactccaacttccatctgtgagggaacaatggacttgtgtttctcccccaccttggtgtaaaaattggttttgttttgaaaggacagggttctttttatgacaatctggaattcagcccaactgagtgtagttttagttgttaggagagaccattggggataggaaagatgaaaggtcatggtgagcttcaaggacatgaaaggttgttgtctcatgtaacaatagtagattgttttttttcctaatatttctagccagcccctaagtcaggtgatggaacaaatacctacagtttagtcaggtgaaacaggagtgggtggaggaaggaaagaagaaaaatggggtaagagagtttgtattttgttaaaaaaaatgaaagggtaacttcagtctgctttcattaaacaaagcgatatttctttgtcaccatctctgagattccagtgtgctttgggtggtttgcttctgtgggccatcaaatctctgggaagctctctaatgtgttaggaaatgtgatttaagccttcttcctgaactcccagaaggaccaatgatgtgatacttaacaataaatttagttgttttagctttctyacgttattggtgttcttaaaaggttttccttcaaatgcacactgaataaaatgaatgataaatatgaaagaaatttgtttcaccactctacgggattttatcataaattctatgagttccatcactgaaagtttacaggaaactgtttagatgttgctgcaatagtgacacaaatttttctccatgtacataagaaaatgtcacaaatttaagagctactgtgggtttgtatacagaggaggcaatagaaaaagagtgaatacagtgttttttttgttttgtttttgttttgttttccctcaaaaccaaatcaccctttctgggtttaaaatactttatttcagcaaaatgagtgacttgtattttccttccatatcaatattaaaacatttagggttgttgttggtggtgatgtgtgtatgtatgctttaagaactagagagtatataggaacaagtgtactttttcttttttaagcaaaaacatcatctcttgatgatttgagaaaccttcatatttattcttctctatagtcccaaacaacctttatgtgactgaagctggacttggtccagggggttggggagattttcaaattctcttttaatccttggtctttgttttcttgttctagccaaccaccctattgctgtatcctttattcttttgagaagccgtgttcctttgatttattatagatacctcatagacttaaagtaatataatgaaactttagagcttaatgacttttgagttctcctagtccaaatcttatatttgaaaaatttaaaaagcgagactggaaagttgaaatgacttgcccaagacaacttgactaattagaggtagaccactgccatttgctacatggtttaaatataaatactgaaatcaaaagaagactggaaaagcattataaaaaaacatgtctaacttgtttactggtcattttagtgattgaggagagatggaataaagctaacacctggtagtcgtggtagggtctgggattcacataagattttttttggtaactattaacgctccattttaaataaatggagatttttttccctgtcaaaaacaaacaacaaacagcagcaacaacaacaaactccagcagaactgggaaggtactagcataggatccagaatctgcaaacctttcttggtccaggcactgtgtgagatactttcatatgcgttgttataatttacaatttaaacactatttctagtgtagtaagttagttaactgttctttttcctagtttttgtatttgtagaaagggatccaatgttattcaatttcattaggtgttatgagacataaaaattggtatataattgaaaaatgcaatacacatttggcagaatattgtaagactgmaaatttgtgctttatgcaaacacagatatcacaaaacaaatatggactataatgtttagatcaatataaaggccatggtttgtttttggcaccattcagaaagtatttagaaatttgggactatgtttaatcataaaggaggaaataaaataacttataattttaccttattatttcataatgaaatttacttcctagtaatattctggtatatttcatacaagtcttttatctacgtatgtatgagaagaaagaacatgtctagcttgtttactgccctctctctggggcccagaatagtgcctggctcatagaaggtactcaaaaaatagttgttgagcaaatgaaaaaaattttctgcaagattggatcatattatgtatacatttttgtatctaaaaactcactttattgatttttttatgttaatagtcttggagaacatttttaatcactacatcatataccatcatatggatgtaccacaatttgttttaccattacatcagtgacttatagcttttcgctattatagtacaaaagtatatttataagaatatcttgtttattattaaagtggtaaaaatgttaacatgggtgaaaaataactcccatgattgtagtataaggatctcaccaaacttcatcacctccttcaagtttttgcttaaatgtcttcttagtgagatctaccttgaacatcctrtttaaaattgcaacctgctaaacattcctgttctctctaatgctgttctatttgtttccagaaactttttcaatattgaacatactatataatttgtatatcttttaaatgtattggctttctttccaactggaatataaggtctatgatggcaggtaatttttgactgtttttgttcctcatattcgccagtgtcttgaacaatgcctagaccattaaacatgttcaacaatatttattgaatggtttattgaaactttaaaaaatggaactttttaaaaattcgacattcttcagtttcaatggaactgaaactgtctttttttaagttaagaatccttttttcttcacgtgggcaactctcatcaaccaatttttgcactggctaaaacttccattttctccctttgaacatgtacatgttagccagttaaatcaaatcatggcacttgattgaatcttagggcaatgttggataaagtcaaatgtcatgtaacaaataccccaagcttttacttcttcaagtcagtctgaactctgtctttaggtagatggttttggatgaraaatgtcaccagtatcactccttatccctttcctcatctggaagtccttctgttaagaaccttaaggcttaagtatgaactgggcaaactcaggttaatctgattatttatctatactttgggatgattttgccttagtcttcccccaactaatattggtcatgttcttaaaatttccttaggaaagacattttacaaacttccatttactttttcactgtatatggcttatattttcctttaaaaataatgtagtactcaggaggctgaggtgagaggatcacttgagtttaggcgttcaaggttgcaaatgagctatgatagtgccactgcactccaacttggtcaatagagtgagacccagtttcttaaaataaaataaaataaaataaaataaaaataatataaaacaataaaaatattactgctttaagttatctatggatgttaattataatcttttatacagtagcaatttatatagctacagtaatcccttatgtttatatggtatttatagtttcaaagctttttaataaacatgatcctgtttaattataaaaataaccctatgagacacacagacctggtttattatattcattttacagatgaggaactgaagcacagaaaagttaagagatttagtctagatcgtaaatctaggaagtggtagagaggccaagaaaaatctgttttctgagttctactagttcagtaatgtcttttctttgttttagtcactttaaccttctctcataatcatcttttgaatcatcatctttttgttgacctttcttaaaagattctatgaaaataaaaataaatgattagaatttcaatttaaaaaaaatattattttacttggtctactagtcattccagttctcaagggttttcctttaggtttttatggttttttttttccatagcctttatcttttccttaattctggttatgaacatggccttttgtrgcaatttgtgaaaccactggctgccatgtctgccttttgaccttatagaagaaatacataaaacaggatattaaagagtttcataaagcagagaaaggaaaaaaaaatctagggtaagtggtacttagaggcataggcagctagacctcaataagacccatagacaacaagtggagttaaagaacagattctagttttttttctataatggagtatagttattgatgtcaattgtccaaccgtttagctaatacattgtgtctgctatgttaactttctcccaagactgttcctatcctagtagacccttactactctgccccacacccggtacgatgaataggacttgcttattcacatccagraatatgaaatgtataactagctaaaagrccagggaatggttatggttttagatggactactgcactcagctacagaaaaacaaggtggaatcttagctattggaatgaagacaaaaggtcaaggtcaaactcgcaataaggtacatacttttattctgaattctaagggattgcgttggagtccttcttaggtaagcttaagctgatcctagagcagtggctctctaacttttaaggtatgtaagaatcacttgggtggttaggacttgtcaagtggggccyaggtgtctatattttttgcaagcatcccagattattctgatgcaagtgtttatagattgcatttgcagaaaattgccatgaagcctgggatgacatttattgtaggataagggaccatgtcactacaactgttgagagaggagacatttggaatttgaaagtcagacctttttactaagagaaaaatgtatgtcttgtgctcagagctgagttttgtttatctgcatataagaaagcaataaacatgggctggtatgcactggactggtgtgctgtaagcctgttaggtttttctcttcatgtatcttgtatcttgtgttttagcacctgaatgcttttgtaatatctaacaaagatttataccttttagtgtaaggctgattattcttttgggcctaatttaaactgtacctcgtttttactttccttttgatatctgcctgattaaatttcccctgttccttctaccttcataaattgattagcatgagttgggcagactgctgtaatgctaagggttaaccagaagagaattacaaatgaactatctagaaagttgattattaatccagctagagaagaaatatgcttttacttagcaagaatgagtatccaaagagctgataatattgttaaggcagcggggtggaatggcagagcttggtaagtaaaagaaaacttggaattaatcttttctgtccactttttaaaatgattagaatgttgatatatttaaacaattaagtctaagatgaatttacaagctgctggaacaaatctaaaaagttctaaatctgtttgttaatgagatccctatacatgctattggtagacagtaactaaaaagtatttacataagtagataaatatatttaattttgaatatttataaaaatacatgattagatttgtgattaagaacaaggaaatgggcatggagaaatgattactaaaaygaactaagtccaaacctcaaggaatataaactgaagaatcttcagtgacaaactctcttgtttttttcacaagaggaagttctgggttcttaggtattaaaatataatttaaagtaaaatattcacgtaaagattcagtgaggtgttttccagatgtctagttaacaaaaactgttataggttctgatatttttggggtcccagtacttatttcatcatgatgtttaataaggacttttctaaagacagcttttatggtatttgtgaattgcaaggaaagagaaatgagaggctctgtgctatttgtacaaagaaaattaagtgaaaagatatgattttaataatgttcttccactaaagactgctcctcctgttatagaagaaattttgatgtcaatattcaattctataagattgagattttgcataaattacttcatattacaaaaatgaacctttcaagcatratgtggaccatacattactgaatattattgaaactctatgtaatcagaagccatttcaatatactattgttgtacttaggagaagttaggaaacatattaaacttgccttacattgcaattccacacaaacaaatgcacattttctttcagtttacatcttgagtgggaataaaaacaattcaaattagcattttgtcatttaatgcttaaatgagcacagaaaaaaatctttttcaaaaactaaaaattcagtgtcggaaatctacattatatgtgtgcatgtgtttgtgtgtgtgtatttgtgaaaatacacagtatacatgcattcaaaatgccagagcactatttagtcctatatactcagcttttgttagttctaatgttctggcctatatttaagactgggaagagtagattattgtaagtgaaataataaaaatagttaacatttattgagctctgtgtgctaaatgctttgtttttaatctcatttaatcctcatattaactctgtacttgttggaaagctgtaaggattatagtgtatgctaaaacaaaagataagctaattaaagaacccctaacatctgatgctaaaagtctagcgaataaaggctcaggaaacaaaacgtataagaggggagatctctaaattctatgtgcttgaatttctcaaaattgaaagatttgatatgagcctgagaaagaagagggaagggaaataaatcagtgaattcttagcattcattaattctttaaacaatttttattatgaaaatttcactcatataaaaatgtctaaagaatggtataaatacctgtgtttataagaaataaaatattaccaatatagttgaagccttttctagttttatatctccctgtcgtcatgctagtgataatgactcatgcattttgtgtctttcattcccatgcttcttaaaataatatatgcttaaattccatattccttgtatggtagggaaaaccccacctaccattctttgggatccaagaaatactttttcttagcttcctattatactttaattaaacaaacaaaaatattcttagcataaaagaccctggccccacagaatctgacccctctattgccagcctcagctcttgtctttctcccaaatcattctttctgatccagctgctgtactggtctagtgacagtttcttggaccctctaaattcttttttacaccaagatattcacataatgctgtgttctcacctggaatgcacctgtttccactcttcatcagagtgattcctattcattcttcaggtccctgtttaaatgtcatttcttcagagaaaccctccttgctccttccaatgcaaaccttgtctccctgcaaggatcttgtttctcatcctttattttatagcagatattgcaatttgaaattatgtatctgtgtggtttttgtttagtgtctgtccttcactccggactggcccattttgttcttggatgttttacttagcatgtagcacacacggtcttgcacattataagcattcagtaaatatttgttgttgttatcaggaagaggaatgtagtgaatgagaaagtgaaaaaagggagattgacagaaagcaaagtacataaaaatagagtctgttggttggtttggatacactgtttagagaaaattatgcaacttgatgctctaagattggggtgcggatggcggtagaaatgtttttgtttcttaatatctagctataaaacatttaacagcttttcttcatttttgtttcttgtttttcagtgtagtctgtcactttgtgtcctcgctttggggaatctgtattcctggacacaggaactgaactttcaaattataaactcatggagcagccccagtggctataatcttttgtggaaatgctataatgggctctaaaaatctggaaaaatttaggacacagttgagaaaaaaatacctagtatttttgcaaagaaaagccatgagaccacatggaagggttttaaggtagataacaataactaaaatattcatagtgttgccagttgctaaaatattggtagacgcttttgtttttcttcaggaggatatagaaaaggttataaaaacatgaaaaagaaaatgaagtcagtctgagaggatggctgggttttatgaaatgtcagaatatacttatattgtattctatgtaaatctttgctggcatttgtaattaagtccaaggctaaaagattatgctggaacttttttttgttggtgatgagggaaaaggagataaaaaagaggatttaattaaaatgttttggtgttaaaaggaggggatttatagaaygtctcacttgaggtcatagaaagtgccattattaataacattgcaccttatgtttttattacatggtatactttcaagtgaactttttcatgtattatcttatacatttttttacttatctgcattttattttagagcagtaaatgactatggaattctgatggtgcctttttccatcttcttcaatgatatgcatagtaaaaatacaattaaaagtttcaatctcacaatatttggaaagatgaaaagtcagtagattcctttgaggccttatagtaatcctgtgaaatggttaaagtagagctattattatctttgtttcacagctaggaaaactgggacagaaatcagaaaaaagccaggactgaaaccttgtttttcctttttaaatgcataggtgtaactttctagataagatgaatattcacctcacccctgcactcccaataagattaagattgtaagttaggttcttctaaggaccaggatgaattaggtggatgtccttcgtaagttgtctagatttgaaagtttcattttttccaattttctaaagatgcaaagtagttaacaatttccagcatatggaactgagatggttaaaggcatgtaattagcagagacacattactaagcctaattataggttaaggtttattggatgaagtttagtggttaattccttgcctgatatcttagggttccaaaaataagaagacacaggtgtgggcttaaaagaatgaaatagcataatttttagtaaatgagctgtggctcaaatgaagccatgtgataaggcagaagatagtagcctcttgggtagacagccaagtcacatgagctgaagatgggttagtgcccatttaaaagatattttaaaagagaaagtgaagagcaatgtgtatgtcacttatatatatatgtgcaggtaggtagagggatattttttttgaaaacaaatgccaggaagtatttttaatgattacccaaggaggctgttgcttcattaaggtaaaagccaaatcttgttgctttttttccaactgaacaaatagcctagttgcagggaaattcagtttcttactctttcctgggctcattggcgaaagcttcccttaggttaaaagaatgaagcatgtttattctgaaaaacagaaatcttaggagaattcagtaggtgtcctgagatggctagagtgctgtcatagggaaaagagtgaaactgtggagcgctagactcaagttagtagttgaaagtctcagggaaccagagtcacgggcaggcagaaaaaataattttgtagcagttatggttgactaaaaatggaatgggctttttgttgtgatgatgaagttcttgtcattagaaagaattagggacttgacaggttaaaatgttgagttattccaaattatttcaatattaaagtttatgagaagatgtcctctgtgagtcacttggctaagacagggaagtgagtcaacttaagggacaaacatatattcctctattatgtgaagccaataatgaagttcatgaaggccagatgtactttctgggttgctcaagcatatgaataataaaaaaaggtgtgtttttatctgtagacagccaattgatatctggaattaccccaagtaagaactttagacttcaccatgtatccccaaacctcataagaattggtgtgagtggaactgtactataaagggaaacaagaggaatcattttgtttctccacagggtccagatctggaaaataagaattttaatctgcatttggaagaacaggttttaaaagtagtaataaattaatttacttatctttaaaaagcttctgatcttctggcacattaaaaagataatagatcacatgtttaagcactttagagattttctgttattttagtttctcttactgaggtaatactttcatttaaaacattaagtatattttaaatttagacaagtaagacacaaatacattcttattgtagaacagtgcctggcatatagtggactatcattaagcatttgttgaattaataattattgaaaaaaagatgagcaaaatttttcttaatgtgttttctcaccctaaagactgtttcttttcccaagtgtaactactattttcaattttctttgtatcctttcagacttcttgtacaatcacatacaaatatataccattacatagaaacatgcggctttatttcgtgtcagggtaacagtgtccccttttacacatattgctttatactttacatgcttttttcatttaaaattatggcttggagctctatgtcattttatatagctttatctcatttccttctacataatattttgtactatatatrtaccattgttgtattgctagacatctgagttatttccaatttaaatattctcaactgaaattttaggtatttaaatattgaggatggcaaaacctggtgtcttttaaaatatataaaatcagtatagaaaatttctacttggtagagttataaaaattaaatagaaagataaaggcacctagcactcagtggacctttaataattagtcctctcccttcctttcatcttctcttaaatcatttgcatgagggtaggattgaaagaataaggaaatatgatctttcacatactcattttcatcttcacttatatgttatttgtattgcttactgaatgtttaattcccaatctgaaggctgttgaaggtgttgactgacttagtgcctctttcacccattgttctttaatgactggctgaggaggaacatgtttactaataatgaattaattcattcactgactaaacatcaatttgtacctactatatgccaggcacaaagaggatawaatgaaaaagatatgattcttgcaagaatcttacaaatttgtcagcaagacagacacataaactaatgaataatgtgacaagagcttgggtaaatcagggatgggaacaactagatgagtagtcagggaaggttttcttttttttattaacatactttaagttctgggttacatgtgcaaaaggtacagttttgttacataggtatacacgtgccatggtggtttgctgcaaccatcaacctgtcacctacattaggtatttctcataatgttatccctcccctagccagtgtgtgatgttccccagtgtgtgatgttcccctccccrtgtccatgtgttcttattgttcaactctcacttatgagtgagaacatgtggtgtttagttttctgatcttgtgatagtttgctgagaatgacggtttccagcttcatccatgtccctacaaaggacatgaattcatccttttttatggctgcatagtattccatggtgtatatgtgccacattttcttaatccagtgtatcattgatggacgtttgggttggttccaagtctttgctattgtgaatagtgccacaataaacatacatgtgcatgtgtctttattgtagaatgatttataatcctttgggtatatgcccagtaatgggattgctgtgtcaaatggtatttctggttctagatccttgaggcatcgccacattttcttccacaatggttgaactaatttacactcccaccaacagtgtaaaagcgttcctatttttccacaacctctccagcatctgttgtttccagtcagggaaggttttcatggagtaggtgacagttgagatcaaacattaaaggcttactaacatttcattgaacagatcaaaggaaaggacagtggaggcaraggaatagaatgtgtaaaggcatgaaggagtgaaaaagcatggtatcatttaatatgtctttaaggcaatacaagaaatctttattatcagagagtagttggtagtgagaaagggccacttaatccactgaaaattgagtgagggtaacaactatggactctggacaaaacacaactatctgaaggcactgaagagcaacttgaaacagactaaatcttgagaggagaatgagctttggaagaatgcagggaaagaaactgggtaagtttgtcattttcaagctttctagtatgagggccggctgcaaaaaaagcagcatttttttctgacctggagaatcaaggcaacagactttgggcaaccacaactgctaagaggtgaggaggtaatcttgggaaggaaaaagccmcagaaagggaaccccaacttctatattacaaatctctgactgatccccaaaccatccacgaacaggattgatctcaagtagcccaagtaaggttaaaagagctaaatagatgtttgagctactgcttactgcaggtaagacaaaatatgcagttcgagtctcagcaagtaagcttctttttttttttttttttttttttttttaagacggagtcttgccctgtcgcccaggctagactgcagtggcgccatctcggctcactgcaagctccacctcctgggttcacgccattctcctgcctcagcctcccgaacagctgggactacaggcacctgccaccatgcctggctaattttttctgtatttttagtagagacggggtttcaccgtgttagccgggatggtctcgatccccygacttcgtgatccgcccacctcggcctcccaaagtgctgggattacaggcgtgagccaccgcacccggccgtaagcttcttaaactgcaatactatttagaatactataaatgaatctagagtctccacagcatagtggtcacaatgtctaagatataatccaaaattgctcaacatatgaagaaccaggaaaatttgaaaaaaaaataagacatctcagtagagagagataaattattaaaaagagccaaagggaacttaaaaaaacgatatctgaaataagaaaatcacttgagaggacaatcagcagaatagagatgacagtgaaactgaagatagatcaatagaattatacaatttaaagaacagagaggccaggcatggtggctcaagcctacaatgtcacctctcctttgggaggcttaggcaggaggactgcttgagactagtaagtttgagaccaacctgggcaatgtagcaagaccctgtctctacaaaataataaaactagctgagggtggtgacacgaacctatagtcctagctacttgagaggctgaggtaggaggatcacttgagtccaggagttcaagtctgcagtgaactaagatggtgccactgcactcttgcctggttgtcagagtgagaccctgtctcttaaaaacaaaaacaaaaaaccacaaaacaacagagaaaaaattggaaaagaaaagaagatgaatatagcattagggatatatgacaatattaaaaggtctaacatacatgagtcccagaaaataaaagagaatgatgttggggcagggaaaaaaattgaagaaataatgccatcaatttcccaaatttggcaaaagatataaatgtacagtcgtaagaagttcagcaaactccaagcaagataaatgcaaagaaaagtacatctaggcacctcatagtcaaattgctggaaacaagaaaaatgtacaggcaaaaattgtttttcttttgtaaagaccaagaaaaaaagaaacacaacttaccaatatcaggaatgaaagaggaattatcactataaatcttacaggtattaaacagacaataagaaaatattatgaatatctgtatgccaaaaagttatacaactaagatgaaacaaacaaatttcttagaaaaaaacttactaaaactgacacaagataagaaactgaatttgttcattaagaaaataaaaatttctataaaggaaactccaggcccaaatgatttcacttgtggattctatcaaatatttaagaaataacatcactcttacataaactctttcaaaaaatagaacaatttctacctcattttatgaggccagcataaccctaacaccaaacctgaaaaaattataagaaagaaaaattatagaccaatatccttcatggtcatagatgcaaaaatctttaacaaaacaacagcaaatccagcaatgtaggaaaaggatgaaatatcacgaccaagtagggtttagtccagaaatacaagattggtttaacatttggaaaatgtcactgtattaacagagtaaatgagaaatcatatgatcatttcaatagatgcagaaaaaacagttgaccacacccattaataattaaaaaactcccagcaatctaggaatataataaaactatttttatctgaaaaggatggctaggaaaaacctacaactaacatcatatttgatggtgaaatagtgaatgctttcttcccaagataggaaacaagatactgtccatgctcattcatcctacttgacattgtatttaaggtccaaccattagaatgaggcaagacaagaaagcaaatagtataataatataagaggtaaaaagtaggattgtatctttgccaaagtcatgtgatacaaggatgatttcttttgtattttaatatattaagtaggtggggatcaaaattgcatagtaaacaatgggaaaaatgatttcattttgagtcaacttttacaaattaaaattaaaattagtaaaaataagtttatatattggcagcattcatttataattctaactgtgcattaattcttagaagagtgatcattttttaagagtaatttttcaggtcaaatattatgaaagcaaaatcaattttcacactctagtaccatctgtcataacaaaggccatttttgtaaagaaaattttctaaggactttgcttaatctttttatattcaaataattcttttatgaataatctaccatattgactatcatgcttgccactatctggttcttcagcttttatcttattctaactgtaaattgttgatttttcaatggtttgagctgttcactgacactatatttctttgcttcatgaaatcttgcatcttttgcaagatttgtgattttgctttgcagtcaccttacatttttattttgaatagtggtttcaatgccacaatgcaatatctggtaattgactagcctgatgctcaaacttgactgaaaaaaaaattacaggtatatggcattttaaaaagtattcttttgcttaggttacacttcaatcagttaaatcagtcttttgaagtgggacccaggcatcaatagtttttacaggtctccatgtgacttcaatgtgctgacaagtttgaaaccactgagcaatgatgatcaaagatacgaggacattaacccacatgtgtgagatacatgttaagttaatctgtgagggatgtttaygtgaagactaattttacaaatggtaagtttattaatgaaygccttttaccttttgtataattttagtgactcacataatgaatatttggataatgagagaatctcctaaatccattgagtaccaagtatatatgggccaggaatacagtggtgaactaaaatgtatgtcgtacctttctctagtttacactccaaataagaggaaggcattaaataaatatttaattgtaggataataaatactatgaaggaaaagggagacctaattcggtttgggatcaaggatggtgactatacattagtggtattaaagctgagacataaattrtaagtaggatatagtttggtgaagaggagacagaagagggaacagtatttatgagggccataaatagaaaagaagcttgcaagctctaagaacagatatcagggaagatgatttagagaacattcaacagagaacagttagagaagatcaggtcttatgttgctaagtgtgtgtatatgtgtcaggaaataggaatagaaagataatgtggaatcagcttattaatgagtgttgtatctatatgcaggaatctgtatcttgtaggttatggggaaataatgaagggttttaagtaggatattgacatgattagattttatgtttcagggccatgactcagttactycaccccccacctgccccccgcaaaaaaggtttttccaatgtgatattctcaacttagaatcaggaaagtaaacttytctttgttttgtgtttcctgcattaaggtaaaattattgaagttgaatagatttctccttcaattctcattattatcccactttccaagctaaatgcaaaaccacatgtataagaacracaacaaaaaacaacaactctgctaatattcctcaagggccatatgcataccaatacaagcagagtctccctatgagcattacattttgccaaagacagctttgaaataaggctgggggagcttgagagccatactcaaggggctggccccagagaacaatatggctccagataccacagacctctgaacatgttaatgtggcccaaggcaattcaacagcaacaaacatgaaactatcctcttagtttgaatgactattagctagtgggaaaggaactgtgagagaaaaaaaatgcaaaattttaattaaataatgttttacatatttttctcctttggactcaattcagtcacaaatgatgtggcagttgcctgggatttccacagcattaattaattcaaaagagcaaaatatgaatcagaaccaaaaacatatttattatgcccttctttccttttaagcatcatgaaaagcttagcgtctcttgtgatcacaggagtttgcatttctaagacttgggtgtatccaatttaaaatggattaaaatatgctcccaacataataataaagaaaagattttttaaaattttttcttttctgtttactgaaaagtttttcttttaagtgatggaaataagacatgaaaataatgacactactgagattaagcatacctcaagagcatttttgtttatttcccaaggataaaatgcacttcaataaacattttacaggcatgatttaaacttaccctctttttattataaaatatagatgcctctgatattaaaaatgttatatgttgcttttaacccactgacaatcagaatccaagaaaagaaatgaaatagtcacagctgagtcagctaaagtgacaattagacctggaaatgtcaacttttgggggaaattatagaaaaggtgaactgaatattaattgggaycagggaagcacataatctgaattctagttatgattctgccacagattaactgtgtgactgtttcatttagttcatctcaaatctgtactagccctgtactattacttctgataataataacaacagtacttgaagtaattgagagtttacaatgtcctagttagtactttgtgcctttttattctgcttttcactcttttaaaattggagctctgattaatgaagaaacaggaaaatgatttctatttctggaaagatgccctttttccagatgaaaaagtcctctaggatctgctgtatagctctctggcattttctctattaattgtacatggtcttcagtgggacaattccaaagagagatagatactacaggtcagaaagaaataaaaagcagtatgttcttttctgatatttaatttgctttctatgctgccattctttttttcccgttgttcaatgtcagtgattacatggtaatagctaaatttgccaaaagcatttttatttctattttagaatgtaaaaaggtgcatttcccttatgactatgctttttgaaatttctcaattttatcagttcatttctatgttttcctagagttgtttaaacatttttttttactctaaaattgagggtgtgtcagaattgttgcaagcaaagacagaggtaatcatatgtggtttttgttataagctttgtgttgatactgactgctatttaaaatagtatctttaagatgaatctacttttagcattttttctttttcacgtgagtttattgtgcaacaactaatcaaatttttctcttatgttatattattttaatacctttattcttctaggatgtcatggaggtgatttgaamagggaactcagtatagaatgagttaatctattattgcacatttatgtatttcttaggtttctaaagacttcctccttaagtgccaacattatttttacattttaactatatattctgattcctaaacagtttcttgtttagaaaaaatagaaaggttaaagaagataattaaaataacctatatttcattttcagagatagttcctgttaatattttggtataatatatatgagggtgaggttatatcatagttttatcttctgatttttaaatttacttttttaacaacgtttctcaatggctcatctatcactacaaacatctgattcctgagctgttccctgagttgagtgtctgttaaggctatttatctctacattgagtggtctccaaattgctggggtttttttgagttcttgtgtctgcatttttggtttcctatctttgcctttttcagacttgaagttgtcatttctctgtaattagtgtttttgcctttagcaatatcagtcctcctcccatactcttttattagctgctacttctatttggctatgggctgttaaattagataagaaaagagggaaaactaacattttataggcttctcttttgttgtacagcactaatgtaggtgcttttacatgtgatgccatttaattctcaaaataactccttgaattgttattagttcatattttaagggtattaaagatccatttattgagcacttagtatatgctaggcactgtgctaagaacattacatgtatctattgggcttattcctgcaacactccagcaagttgaactattgtacagataaagatacctggactcagagaagttgagcaacttgcccaagattatattattggtaagtggtggaagcaggatttgaacctaggtgtgctcctcatataattaaaattatgctacagttatgcttaagtaagagtaaatagattctgagctgaggaattctcctttaagaaaactaaataagctttaatgtatttccttgagacatctgttttggattttgctgcctttctctttcttcttattgctctgttatagggatgttgctgtataaggaatctatggagcaatgtagtgacataagtgtggaagagtctaaggaactcaatatttatgctgaattaatcctaaaagaatgaactttaaacattttatgaaggaaagagcaattcttattattgttacagaagtctctatttcatgactcatggaatcgtgagtgcattctttgctaaatttcctatatcaaaagatacttacacagaagctaatacaccattgtatagctacatttctcaggaaaacaggatttaatctcaatgtatacttcaaattatccatgaaaagggagcaaaaagttttaattagttttttttttgtttgttttgtttttaatggtgcttaagagattaagttgcggttaagagcttggtctttagctagtctgcctaggttaaaatcctgactctgccattactagtacaactagtacaactaccctggagttgacaatgattccacattgaactctctaacttcattttaggtccatttcttagatctaagcacaraaacacctaaaattggagtattttattcagaatagacacaagcttcaagtgaggaattaaatatagcatctctttacctttagataattttcccccaagttgagagatttcctctgccttttgaaaatatgatactatattaggtaaaagcattacagtgcagttcttttcaacagctgaattgagtgttgaacttgcttggtatcctataatagagagcactccttattaatttgctattttattattgaaagtgcaaatagcaaattattctccctccctctgttgtgtgcatgtgcaagacaaagataaaagccatgtttccttcgtggaagggtgtggaggtagaggatgatttcaattagaaataatgacagcaatagacgcttccaatgaagatatcgtggccaccaaaggacaaaggcaagaagttaattcctgaagtcgaggtatttgattaaacatttaggctgttctttatgtgtacagatgccaagtatgttgttatttacaagctaagtgacaccgtatttgacaaaggtattttctgaatgttttgatgatggttgggagagaagcaaccctgtgatatccagagaacctttaataattaaagtaaaaataacattttgataagcaaaaactttgctttttaagacttttactcctcttttataatgattamacgtaagaaatggcctattttaatggtggtttattattctggttaataacattcacttagaaaaattaccagactttgattagaacatctattgtatgtgtgtgttttttttccccactaccttaacaaattgttttagaaatagcttacaacttagtgtcaccctcaggtgtttttatgtctaaacatttatttttaaaactttggtattgtgttcattgtgcctctgcctgtgtgtgtatgtgtgtgtatgtttgggttttgggagggagtgggggaataagaagaaattttagatatggaagtcggtgaaagatgatgtgtgagactagaattttgtactgaaaaagaaaaggtttcaagcatgttttctcttttggagagaaaaagaatgaaactgactatattatgcatattttcatgaagaatgtatataaatataatctggaaaattataaaaacaaacttactttctagagatggaagaaaatatatgtgacttaaaaaattgcagcagaggtaaagaaaaaaaaattgaacatattttaagcatagtgtccaattgggataaagttttaacagaacaggctgagccatttatagattacaacacttttaattttctcagtgttacaaagtgtttattttgataaagaatttgttgatgctctatcagcttttccatgtgcagaagtgcaactgggtgattagttaggcttgaggctagcagccaaaatgtagaaatttggtccccagttctttttctggaataagaaaaagctactgagttttcctgagccttgataccctattgcagaaattcttcactatcaaggatgtcagctcttttctctcttctcatttttcttctttctttctaaaattctttttgtctcatggtattaccatcttcatctgtgtttaattaagtaagtactaattttggaggtattgtagggtttatgttagcttagtcatatggaaattctttacatttgtatcaattttttctataattataaagctaaagaatctattttttttactgtaagtttaaagacaaggaatctaaaacttggagagattatttggcttgctcaagatcatatgtttagaaatcagggccgggacttttggcaatgccacactgccaattaattgattcctgttcatttattttttgtcttgctatattgatgaccagtgtcagtatgttatttttatcatctgtttaattatttcacaattgtcttattttgctatatctacctatctattagtagatggacacatatagaggtgatttgcttgattgctttttatgtctcatttgcaacttgatatagttgacatgtaagtggtttcatcattaaattaaatttatgattggttggatagaatacaccaataagtttatgagatttgctttttttagaaaaactatcatacttatttgtgcctgttttggcagtaagaagttattatgttgttttttttgcatttagccataattatggacttgttaaacaattggttggtagaatggatttagataaaagagtaaatatggtctttcttattacttttttttctgattaaaaaaccaaactatggttattggaaaaagtcagaaaatatgaaaaagaaattataaaagctctgtratgacatttagggatacctcagaatgtttatactgattatatccttgacgtttttctgtttagatacacatattttttaaaggaaagatgggatcttattgcacatgctgttttgcaagctactcttaaaaagttaacatgtgagcatttccctatggcatcagattctcttctcctacctaccttttctttttaaaatgaactttttgtttactataaaagtaacagatattatatagaagaaatttaggcaatacatataaaaataaagaaaaaaaccttttcactttatattaaggtatatacactttttgtattgaagattttatgtctgtgcctatctatctaatatgcatatatgtatatttaaacaaaaatgagatcatatggtatmaaatatttatattatattataatctactttttaatttaatggtatatcatttacagtttctatgataccacctgttgttttacattattaattttaatggttgcagactattctattgtggccatttcatagcttagctgatcatctrtaggtaaggttgtttttgattctccattattattaacaatattgcagtaaactcatctgtagctaaatctttgcacacatctgtaattatttctttagtttaaattcttaaaaatggattgttgggtaatccctttttaaaggaatttgattcctattgccaaaatgccccccaggaaagttgactagtttactcttgtcaacagtgtataagagtactcatttttcctcatccactctgacacattattattatttttttaaccattgtcaatatgacaactagaaaatggcatcttatttttagtataatttgcatttctttcattagtagtgaaatggaatatttctttatttatttgcatttttttttctttttttgagatggagttttgctcttgttgctcaggctggagtgcaatggcacaatctcggctcaccacaacctctgcctcccgggttcaatcgattctcttgcctcagcctcccaagtagctgggattacaggcatgagccaccatgcccggyggattttgtctttttagtagagatggggtttctccatgttggtcaggctggtctccaacttccagcctcaggcaatccacccgtctcagcctcccaaagtgttgggattacaggcatgaaccactgtgcccggcctgcatttcttttttgaaaaataaatttcttactcataacctttgagaggtagtatagattttggagtcagattgttgatgacagggtttgaatcttggctgtcatcattactcaacagctctgtaaacttgagcatttgcttaatttctcagtgtctcagtttccttatatgtaaagtgggaataataatattacttatgtcatagatctgttgcaaggatgaaattcatgaatatatataaaaaawatttagaatagcctatcacaaagtattgtacattattctaatgggtaattaattcttattgatttataagaggtctttatatgctaaaatagtaaccctttgtcwtatatgatttagacttttttaaattttgtcattttgtctaattaaaatttttagaaaatcaaatctctctcatgaaatctaaagttttatttttgatttctgcctttagaaccatttttagaaatgtctttcctatctaacattatgtaagtggtcacatatattttattataatgttatttttttacctttaattttcctaatctatctagaatttattttgttgtgtgatatgcaattaagatatgaagaaccaattatgccaacaatgttagtcatatcattcatcttttaaacactatgattttcattatagggatatttgggtctattttttagcttctttaattgatctgcctattcatttggcaaattttaattattcatattttatgtgctttttaattgaattattctcatttaaaattatcttggttattcttgagtatttgtttttccacatgaacttttgagtcattttatcaagtctttccccctacccccacttccaaatctctgtgattttaatagaattatactaaatttgtaaaacaatttgggatgttatgacaaaatctcaggatgcattgtattttactttaaggacacatttttaatttaacgaatccacaatacctagcacatagtaggcctcagtacatgtttgttgaataaatgttaaatgttttagtacttactaactgttgaacatttaggttgttttgatgttttctctatcatgagtaatactttaatgaacatatttaacatataaatttttgaacattattatgatgacatctgtggagtaaattcctagatagctagttcgaagataatttttactggttttgatacactttgccaagttgccttcctgaaagcatgcaccaatttatgctccgcccaacagtttgaaaccgtagtgttttgatcagcttatttgtctcctcatggtaagatgcagttccaatttctaatgagttcgaaattaatatctcatggcaaaagaaacatttttactttttaaatgcttgtttatattttctgggtatggaggaggtaaaagatacatcgaaattgttgaatttctagtaaaatcctgactcttctgctatagatattaacacaatcaatggaaatgttattctccatgcttgggcagagtcacatgtgcaggaaccagataataataacaatgaaaagaaamcaataaatattactttagaataatgtcttcaagtggatgtttttttccatcttaaattgtttttctttttttgtacagtgaaatcacttgttcccctcttctgataaaaacaaatgttggttgcctatgtagtttctatgtctatttgattttagttctttttgtgacaaaatattttcagtggtacctagcatgaacaacctcactcctcctattattaactggcttaaagtggcaatttctggtggaggagaaaattcatatttattaatttttgtccttgcatatctgggaactgagatataaacaaggaaaactaacattacagttttgagtagttgtacagtaagaagctaacaggtaaacggctttaccctggttcctgcagtttttatttatctacttaatcacttttcagtcttcctctttttccttctcttgatgcagtatatatactactgaaagagaataaggctgaatcctgatgatatagtttttatcactatattttaaaattgaaatcctccttgttgggaaacaaatgccaacatcttcaataactctgtaactaacaacttgactttttttttttaaataaaagaattcctttgtaggttgctttatgaggttttcatttcttgagatagcactccttaatattcccgtctttcttttttttattttctttttccttctcttctacttcatatattccctgtcaccccaattctctcctttcccttcccttatctcccttctcttctcttaaatttagtgagtccttaaaaatatacgcttgtcagttctgaagtctaaatgttctatctatagtgcagtaggttttccccatttttaacagttgcctgggggaaatttaagttgatctgtcctgggtctgcagaatgtagtcatgagtttcagtgatgaccatgaggaattctttcctcattttcttactttaaccttatagagatcatgtgaaattcttactatcagcaagagtgctatgattttaaaactcaatttgcatatgcttcctcttcctgtattcctggtacccatcttctgaaagtaggctttagccattaaaaggcaggagtgtagaggaagtcggcaaaggatttcacttataattatagctaactctatcaaacatgcatggattatgtcttgaggattgagtacaaccattttctaattctaggatcactttcctttggcagctagcatctttttattctggatgcctctctctctctatttccactatcatctctactcccactccttgctagtgttttgggatgcaagtttattttaatattgaccttaagccaatctaatttagaaggtataaatccaggaagaaaagaaatcacattaggtatgccacatgtttacagaaattatttggaattaaccaaattgttttaattattattatcattatactttaagttctgggatacatgtgcagaatgtgcaggtttgttacataggtatacacatgccatggtggtttgctgcacccatcaacctgtcatttacattaggtatttctcctaatgttatccctcccctagcccccaactccctgacaggccccattgtgtgatgtttccctccctgtgtccatgtgttctcattgttcaactcccacttatgagtgagaacatgcggtgtttgattttctgtccctgtgtttgctgagaatgatggtttccagcttcatccatgttctttcaaaggacatgaactcatccttttttatggctgcatagtattccatggtgtatatgtgccacattttctttatcgagactatcattgatgggcatttgggttggttccaagtctgctattgtgaatagtgctgcaataaacatacgtgtgtatgtgtcttcatagcagaaggatttatattcctttgggattgctgggtgtgcattagctctttaaattatttgggattagtcaaatctttaaaaaaatgtgtttgccttagcttttcaattgcatccattactgtcaccaaataatattcaccacagaaatatgcaactttagagttttagtgaattctttaggaccaggacaatttcttctctyttttttttttcttttctgtacaacacttagtgctttgaagtttcaagatctggattggtgttttggagtttggagaactgggttctaattttaactctgctactaatttgtaactaattacttgaacttgaacaaattgtttaaactctctaggcctcactttcatttcagttgtaacaatctctctggttcagtgatgcaaaaaatctgatttcaactggagagattaggtgtgatgagaagatgtcattattctgtttaataatatgtataacttttgtatgaatgcgttgggtggcaaattaattggtgtgggctagaaagtttgaaaaagctttgaagtgttagttaataatagtaaacttctgaggcttctttttttcacatgagttgttggaatttatacctatttttttatataacacctaatggcagcagtaatttttttttgttagatgttgcttcattttgaagttccattcttaaaagttgctaataggcatagtgttgcatcaagtttgactttcattttatgaatttggactgtagttgtctyctttttttaaaacagtgwtagaaaatatagaaatgtcaataataacaaaaatgatcgtggagagaagtttgaagagtgagatgggaaagagagaatgtgaatatgaaaggaataaaaaccaacctgctctttcctatttaagtatttgtctggctttcaaacacaattttattttattgtttcttggattttatggagtatagaacatwgcctaagaatagagtggataaatttatcacargcacataattctttttgccatgtgagtgtgtttgtttgttttttcattacaaagaaacctcaccacatgtttttaacatttttattatttaaagtatttgaatcatattgtggcatgtgtttcttaaataacactcttagggtgctaaataggagaaaaggataatgacattaatattatttttttctgtttaaaaatgtattccacgtgtgatatttgaaataccaattgcataaatgtagaagttaatttttaaaattattttgaaatacattgccatcattttatctgaataactctgaatctgaagaatgcagaagggttagaaagaaaactgcagatctgtgaattagtgataatataactaaaagttactatatgttataattaccagagattctaatgagctaaaaaagatgtgagttcctgacaatgaaaacatttggaataggttttacaggtttccttattttttgggtatacttccatggggttttagtgttttataagaggtaattcccagttcagttcataggcagtccaggatgttctgaataatgaagaggcacataagggagttcagagaaagaaagatttggctttatgacttaagtcagtatgatatagcataatattttgagataatatctgcatggaagctgtagtaactgtattgagttaaagatgggtcaatgatgtacagccttgagtatttattagctatactgagggctacatttctgtattaataaagataagttagcttccttccttcttcccttccccttctccctcccttccccttctccctcccttcctycctcccttccttccttccttccttccttccttccttccttccttccttccttccttccttcctctctccctccctccctccccctttcttttcatttcagcatggttatgacctaataatgttcagaacatataatatgtatacacatatgtgtttattcaatgtatttgttgtttacttttattcttaaggattagagttaagcacatatcaaccagaaaacctacaaacttttgcaataaaaaattgacaatgcctgggtatgattgtatctctggaaattatagaaacctataaattaaattctcaagtgtgatactgcatcacttacttgcaagatttactgtttctagagctgtaagggaagatgttacagatgataagaactatctaatattgtaggagtttaagtttatttagtagtgaaagagtaaccccaagaaggaagttagaccaatggaacaaaacaaagtgtgaaaggaagagtgaggtaagacagggcatctgaaacagtgggacagaaactgaagaaggacccgtttgcttggattgactgctgacacatctctcttttargcatgtgtctagaatttactgctttacattttgtagacatatagaactgcatatcrtgaattgtcctttgtggttgtcattctgcctgtgaaggatgaaaatatgttagaaacaaaaagttgagatagttttgccgtaaccacagttttacgatgaaattttatttttgtgcactgttgcttatagawgtatatgtattcatatactaacacactattaggaataacattctgtacaatgccaattttccttctcactattttttcttcctaaatatatctacataccatgaaattacctttgcgaaaaaaatggttatatcatatgtatgagcatggcaagttctgaacatagttcgcactaactaatgtgaacttttatggcataaggacaaaaaatgaaatcttcctagtgatgggcagggattcatataaatgaaatmacatttttatatcagaaccttaattttactttttttctaaggatctttcagttccagttgttccatccacgtgtccagctggtgatatcaaattgactaatctctactggctctctccatcaacatctcaagggtggttaatgatgattttattctcttattactttgcttttatttaaattattctgcaattcctctcctgtgaaaaatcagtgttctagcttcttgtgaccagtcgttaactgtatattttggagtcagttattatagctgtcactcaactgggcttatctgtgaatggtgttttggagaagtggcctttccaacaaagtcccaccctttgcygtcaactgaagtctctgttagtgctttactctccctggtgacttctaacaaccttgattagttggctctacaattttaaagtctgccatctgtctctactttttctttctttttgtcttttattcctatgccattaacttatcattattccttttctactagaaaatatacatatgtctattatatattaaaaataagtatttggtatactttagtatcatacctagttagtgtgatgaggatgcagaattgaataacttgcttttcttaggtcctgttttatttattctggtcatcttgagttacctggctttcacagtctatactttcaggagatttaacaatatatgtcattaatcaatcaataaactaattatttattgaactaatatgttcaatacaatgccagatacaaaagaagcataaaatatgattcttgctttcagtacactcacaatgtaaacaaattaaggcagtataaaatgttgaatttgggaggttttacctgtcatttaacaaatattaggtsccttttataataatattagctaacatatactgagtattatctatgacccagccattgtgctaaagttctttaaatgtattacaggtcgagcaaccctaatctgaaaatccaaaatctgaaatgctccaaaatctaaaatgttttgagtgccgatatgatgccagaagtagaaaattctacacctgatctcaagtgactcagtaaaaacaaaggcacgtagtaattttggtgtagtaatactataatattagagtttgtaatacaattttacactttagaatgaaggcaagatagtatttatacatatgcaacatgtatcacataatgtgtctatgtacacatattcattattctttggcgctttggagtttggaattttattcaacagtgtttactgagcacttactattgctaggcaccagctggggattggagatacatcaatgatcaaaacagaaatctctgccctcaaggagcttacgttctagtagagggaaacaggcaatttatttttttttwaaaaaaagaaaaagtaagttattataaagcaaggtagaagataaatgctatggagaaaataaaacaaaaaagggggatagggagcacccagggtggaggtatatgtgcaactttaaataggatagtcagggagggtatcattgagaataaaatttttgcctaaaaacttgaggtaaaagagaaagggaaccatgcagatatctgggggaagagcattccaggcagagggagggaccagtgcagactctgaggtagaagtgtgcttggtatgttcaaggtacagggagggatgagatcagagtggctggagacaaatgagtgaaggggggaaataataggaaatgaagtcagaaaaatgacaggggccgggttaaataggaatgtgtaggtcattgtgaggatttggcttttactctgtgggagatggggagccattggaacattttgagcaaagaagtggtatgatctgactcatgtttattttaaaaggatcattttggttgtttctgggaataaattatagggatgaagaagagtagaaacagggtgaccacttaagcggctattacagtaacctaagtgagagttcttggtggctttgagtagtagtggaggtagtgagaagtggttatattccgaatatatgttgaatgaagaactcacggggctttctgacagattggatttgttggatgatagaaagaaaggaatcaaggatgactctaggattctggcctgagaagctaaggatggagttgcaagcaagatgggaaaggctttggaaggtacagggtttagagggartatcaaaagctcagttctggacttgttaagtttgagatgcatgttagacctccaaatggagatatggagtaggcaagagggaggagtgggttggagataaactctatgagagtgtacagatatgaacatagcacttctggatctcaatccatttttttggttctattttaaagacctattttataactttttggttaagataatataacaaatctgaattatataaattctaagggacaaaattataaatttattctgctgtcaatcttttggtctgcctgaagtgttatactctaccagatatagccatgtctagtcaggacaaaaaacatgataagttgttcaaatacttgggatttcattgaaggaatttgttacataggcattggaaaactaaaaaagcaaaaaaggaggctgaggtaacccagatattaataactgtatgaagcagctaccagccatggggctgatggaaaaaaatggaaaaatttgtgttactgaaacctacaagcttggaaaagcttgtgattggggcttggacttgtgatggggaggatgtgctccatgacttctgttcagaccactgagaagaacatggcatggcttatgctgtaatcactgagaggatggtggccagctggtgctggtacttgcgaggggcttaggcagctggtattgggagggctgaaagaagccattgctggtggaaacataaatggtgcagccataaatgtcttttgctgctggagggatgatggacagtagttagaggaaggaagtccgttgtctcttcccaccttctagtttcttactagtctctctcattggcagaacctgacaggaagccagctggcaatgaagtctgggaaatatcgtgccccagcatcacaaggcagagaattgaagagtgatatggaatcaagagacaataaatgaataactggcatatacactgtgaatgttagggcatgaataaaattttgagacctcattctattgaaataattagtaatgtaaaacactcactacattttaagccattgtattttggttatttgttaatgataaatggaagataatatttggtgttgaagaggataagaactgattaaagaatgacttggtttacaaaacttttaaactcttttctatctccaggcaagaaactaattaattgattcttgtayttaaaatatattagtgaataaaacaaatacttttcagttctcatggaacagacaacaataagcataacaagtaagtatattatatagtatgttaggagtttatgaatgctatagaaaaagaaaaaatagagattagagtaagggagactggtggaaagaaacaatattaaataggatgatcagagaagaactcattgagaatatgacatttgaggaattacttgaatagggagttagctgtagatggggcaaatgttatttttcattttttttagtaatagccatcctaatggacatgaagtggtatctcattgttttgatttgctttgcctaatgactgatgatcttgaacatcttttcatatatttattgtcattcgtatacattcttttttgtttggttggtttcctttttgtggagaacagagtctcgctatgttgcccaggctagtcttgaattcctcaagctatcctcccacctctacctccctcaatgatggaattacagggataagccacagcacctggcctatatacatactttggagaaatatctattcaaatttttgctcattgttgaattgggttgttgtttttgatgttgttgagttgtagcagtttttaaatatatgctacatactcacccgttattagatatatgatttgcaaaattttctcccattctctgggttgtcttttcattttcttgatagtttactttgatgcacaaaagtttttaatttgatgaaatccaattatctgattttttttgttgcttgtgtcatatttaagaaatcttcaatgtcatgatgatttcctctaaggtttcttatctgagttttatagatttagcttttgtttttgattcattttcaattaattttaaaaataagcataagataagggttaaacttcattttttaaataggtagatatrcagttttccaagcaccatttgttgaaaagacattttttaattcttttattattattatgatttttgagacagggtctcrccctttcacttargctggagtgcagtggtgagattgcggctcactgcagccttgacctcctgggcacaaatgattcacatgcctcagccttctgagtagctgggactacaggtgtgtgccaccatgcctagccaacatttgaattttttgtagagatggggttttactatgttggctaggctgatcttttccctctttaatctgaaattttaataaatctagatattggagagaaacagactagagacctatagtttattgcagttttattgtgttcaatgmtctttttgctatgcctctgttgtctgctataatttgcaaaacataatgggagtgctagtcaattgaagaattatttcgtggccaatagacaagtaagagactatagtaagtcctcacttaacatcatcaataggttcrtggaagccgcgactttaagtgaaaagacatgcagtaagtccctgaataatgagattaataatgttttgttataactatgagaaaaaaattggttttgttataggttgttttatataaagtttcagtttccaagaacccactgatgataagtgaagactttccctactgtattagatttaatgctttttaggaaagttacttttataatgtacatgtattatttgtatatatacaaacctcaaggtgccagataacagtttctctttatgctaatattggtgtttagtcctttggaaattttagccattgygccattttgattcacactgttgtggtgataagctcctagaatttgtaaatcatgcattttattttgtgatgtgtctaagctgagggtgagattgagagcagtcttccaaggtgatttataattcctgggaaagttatctgagataaatcttgcacttcactgggctattctctttcttccttttgcttcatactgtggatacgcagtactatctgtactttgggagtaggttctttcctttaagccscaagggagaaaatgtggttacgctttgtgtcataactttgtgaatgacttgggccaccagtggcatcattaaagatctcagtatgtatactgtctcttctagcctatcataaatctagcatggtgtgagggagggtgcatttggaacattgttctttcctctgctcttgtttttctgaattcagtcttcatttggacccagttgaaaactgaagatatattaagcctgaaagtgataattctcataaaaagacagtatacttcaaaacaaggaacttcacttctgtttcagaaacagaacaaaaccaaaattagaacatacatagaagcaaaatgtgccttctcaaagtctaaactatatcttagaacttgtctgaggagctaacctgtagatttagattttctatctctacccattacacttgaataaacttcactttggatgaactagttattctagcaaatatcagatgcctgtaccatctatatgagcagtcatcttaaacatttttaaatttttatagatttagggggtgtagttatctttataagagttattgattatttaatttctgctgacctaatagagcttattcacttcgatgaaggcttgtacatgttttgatggttttatgctcttacacttgtgttatgatgttcgtatttgggttacaaatttatcacctgacagtatctgttagatatggaaagaaagtgaagggaccagatagaaaatttgcaaattgtggtactgatgtatgtaagaaatgcttcagtgttaaacagtggttcactttgagtagtaagttttcctagtaaatttgtgtatatctcaatgcagaaagaaagtaattgtgatgataggctatggactatcaagtaatcagttstctgtggtagtcattgaatggtgaaaacatggaatttgacctgggtttatatctttgttctacaatttgcttgcagtgtccttaagcctttctcaatatctgttatcattatagattgtggataatattacccatacctgtcatagactgggaaggattaagtgagagattatttgcatctttttctctgcttgaaatagctctttatggtacaaaaacatatctatatgtgcgatttgtttcagttgcatgtagataattttataacttgctcccttttcaggatgtcaggatgcaggaagaataggaagccctttccaaccagcagctgattaaacactgtatgggagaactgggaaatatgaaagatggcaaatgaaatcctggcagagagaatagtctaatcccaaaggacattctgaacaatagcctgggccctatgcctagtacttagaggggcctagggtgagagactcctgcccctcactgtactattcccagaatcttatttgttaatgcttggctttattaataaagtcatgaccacttgttcggcactgcatatggctggttgtgatttccagctgccctttgggctaaagtgtaaacagtgaatagattgttatgttcttctattaagcttaaagctgtgatctcatgtctgtgccacatatgtctgcaaccagaaatatatccttttctcatggaagggaagcagcactgtgtctgaaaagagtttgaattcattagtctaagagctttttactttttagtgaaaccaaagaacaaaatgaaggcataaaaaatcatgaacatcgtcaacaggatgtcaacatgacaccaaacagcataatatattgttaagacgagcatctaatctggtgactgaaatttctatacatttggcattttcacagaagacagaaatgcaggcagcagtccaacaatccagtcacaaagaaagcctcagtgcattggatttgaaataagcacaacagtttgtctgagtgactgagaaaatacccattgatagaactggctcctaaactctggcctgatttctaatatgctggttaattaacatctaatttttttttactatgttgatcaagaatgttgtttttgtggttggtggggtttacattatagatattaaaattgtttacatggtgsaatgactgataaaaccctgaagttctaagccctctagaagaggaaatttatttatgataataataattactattttataccawacaagatacatacacacacacgtgcatgcacacacacaaacacacacacacacacacacacacagtacttccctgtttatctgatggggatgtgtttcaagaccctcagtggatgactgaaaccacagatagtactgaaccctatccgtactctgtttttctcctatacacacaaacctgtggtaaagtttaatttataaattaggtacagtaagagatgaacaacaacaataaaatggaacaatataacaatatactataataaaaattatgtgaacgtgtctcttaagttatcttattgtgctatactcacctatttttggactttggttgactctgggtaacagaaactgcagaaagcaaaactgtggataatggccgagataaaagtatgtgttacttgttctttataatagttccacagtagtacaatcccagttttacagatgggaaaattgaggcttaaataatttgaacagcttgtcaaaatcgtgggatctgaattcatatctatagttatctgactccaaagttttgatattcctgctatgtcacactgcctctgcccttttctaactggatttacaagatagcttcctggcctctgaaatacatagtcattstgmgtgataatactagcaattaattgctctaccttacatttgtatggtgttttatacttttcaaattgatgttatgaccatttgctcatgtgttctaccttattaccttgtgaggtaatcagggtaaatattattatccatattttacagatgggtaaaataaacacaaggaagataagtgattttgcccaatgtcaaataacttataagtgacagaaccagaacagtcttgttgccctcaatttagtgctcttgtgcaacctctgacacctctttgagggaggccaggttggagagtagatcaagtttgtaagtgcagctcargaagatttcctttcagctaggctagtagataggctgttttcctgaaaatgcaagtctttgggctactaagttatttttttggaaaaacctaattggaatgggcttatcctgtaagtcctgacatttttttctggtaaaagaatgttaggatagttattcttgttctgcattaagcttagcaaattcctgctggaatcttttaggccaggatcttggttcagaagctgttacaaattttttagcccaactggaatagagaaatttcagggaggaggaaaagtcaggtttgaaaaataaaattctttatagttaatttgttgggtaatataatatgccagtagcattatatactttctgcatgttcgtggaaatacccaaaacattgaacaagtagttcctaccatcgaggaagttagaatggacagtgtggtgatggaaaagaacatctggctaagtgtcagaagacttgggtttttgtgctaggtctgccatgggttagctgtgggacttcaggcaaatttccatgcttatctggttagttccctcatctgaaaagtgagaggctagagccagataacttctaacgtactttttttttttatctttaagctcattcaaatcttatttcttgatgccaattagagaaaaactaagtgttaaattgtatggtattaataagtacacagataagcaaagatgcagagactaactgttggagtactgacttttagtaaccaagtagtcmttaaaaataaagttttaacctgtttttatcaaaattataaggtgttcctagaatagcactcagacagggcatggttcttagccctaccacctaccattgtgatttatttaaccaactaaatctgtttctacatctttaatacaggttgagtatctcataaccaaaatgcttgggatcagaagagtttcaagtttcagactttttttgggaggattttggaatatttgcagatattggattgaacatccctcttctgaaaatctaaaaatccaaaatgcttcaatgagcatgtcttttgaccattgtgtcagagctcaaaaattttcagattctggagcattttcagattagggaatgctcaatctctaaagaagttttctccatttactcaaaaacctttattgagtgctaagcattatgctagatgctgaagctagaaggtggtccctttcctttaaatgctcaaattgtccttctaccagggatgtttgcaatttaagaatcttagagttggaataaatcttagaggtggtttaatttgacttagaatgcaagtatataagggcaggtattttatcttgttcactgctttatcctcagaagctagaacagtgtcaagcatatacatatatgtatttaccgaatgaattaatgaaagaagaacagtgagaccatatctggaaccgtgtgtttataagttaacggcatagtaccagacttataaagatctctatgactagaagtatcacaggtataycctgtgtggccattttcacagtggctgcctctgcaatgaagtgtctgacttgtcattccttgcacatgaatgttgaaaattctatgttctggttctgagaaagagtagacgtgcttattgaccttgattccccagaaaattttacaattctgaagcaggcgtttttatttactctgtggcacggaattctgcaggcataacagattctagatgggcttctctgctttttcatgtttcttccattttccagactctagctccccyactttttttttcaccacatacagcataccatgcaatgcttctgtatagtcatgctatattatattttcctctagagaattatcttgctgttctataagggaaaattgctttattttccattttctaggttttttcgggctttcctttggcattttccctgaattgagtcatggggcttttttgagtgtctatcacacaactatggtggtaccatgttgctatgattgttccacaaggttcagagagtggaggagtgaagttagggaacatggggatggaaagcaactgggagggtctttatttttttattgcttgtatcccttagtttatttattttcctttcaaagggggaaatgtggagattctttagaagagtagagaaagagagatgaaacccgtcattccaatgctttagtcattgtccattttgcagtcactgttactttttctccctctgtaayacaagatactcttatttcccttttcttctttgagaggaaccacatgatacaagggaargggctttgttttaggggactgggattttaggtttcaccacttcctacctaaacaactgtgggaaattatcttctttaagcttcatttgtagaggctgattctgtagagatgataattctactgatctcaccaaattattttgtgaattgaaagaaataatgtacaagataaggccttgcaaattataaattatgaataacatacaagcatatagcacttacgtctagttttcaygattttgaagttatcaagaatttcctgttgccatttaaaagtaaagatatatcttacatattttttcctgaattttgcaacagcttaataaagtttaaaagatttggaaattggtattcagttttccagtttttccttgctatcttcatcaggccattccttggacaccctaaacagctgttgtgtgtcagtgcagaggtggttgtatttcactggttcaggattacatgtttctggggtagagtttcagggtctttgcttaacaatggttgctcactctgaggtatgctatctaatttggtgtattgagtggaagttggcatggatgcttcataaatcacagaaaattatgcaaaaatggcacacactaatttttggtaagagaaatacttctcagttttcttattatttttcccagcacttttgtacctgctgctctggttttctactctgtgcagacagactcttctttctatcttttccagtgtttatagcagaagtaatgtgtgagcttacaattttttttaagacgtgagagttgtttaatyttggaacaatgtctattgagtgaaggttttattacaacatctattgagtgaaggttttattgtaaagtagtcaaaagaatgctgaccctgaagtgagactgcatgggcttcaatcttgactctgccacccttattggctgcatgaccttgaacaagtcacttaacatttttgattttacagagtttactctgtaaaaagaagttaataatagtaactaagttactggcttttataaggattgaatatatataaagtctccatacatacagggagagttagctgttgctaatattatttttgaaaacttcttcttcttcttcttttttttttttgagatggagtcttgctcttttgcccagactggagtgcagtggtgtgattttggctcacttcaagctctgcctcccgggttcaygccattctcctgcctcagcctcccgagtagctgggactacaggtgcctgccaccatgcccggccaactttttgtatttttagtagagacggggtttcaccatgttagccaggatggtctcgatctcctgaccttgtgatctgccygcctcagcctcccaaagtcctgggattacaggcgtgagccactgtgcctggccaaaaacttcttactattagagtatattggagtcattcaacgcattatttattaagccctactatatacttaggtttctgccagttatcttgggggatacaatgtattatgacacaattcttgtccccttctagaggctgagtagtataagatatgtttgggcagtacatcttgcctgaggagcctgctacaggcactatggagttgactggggatatggaacataaacatataggaggaaacaaatacatatctattttgatccaattaaatgaatgttacacaagtaatcgtgataggaatgcaatggtgaactaatattttgtggacaggcttctggaagaagtaakatattagctgagccttgaaggtagagtctggaaatgtagagatggggaagagttctgtagggaaggaaagaatcagaatatatacacatcataatgtagtggaaagggtgcatccaaacagactaggcatcaccacccaaactctggtgatgcctcttactagttgtacaactttagatcagctactcagtctcccttctcttctgtgaaatgggggacaatgatatttactttttaagattattgtaggtcttagacatagcctgtgcaaagcagctaggatagtttttgacacatggttaacattcagtaactgatatcattagaagtatagtgtaaaagttaaaagcatgggatttggagtcagacaggactcacttgaatctcttctctctcatttactttgtaaccatagtcaaattacttaaccacttctaagcctcacttagctcatctgcaaatggggataaattggtagctttgttgtggggttgttttgagatttaatgaggtactgtgaagcataaagtaatgagcttgtcgcatagtatgcactcagtaccattagccattaggttgttatttttattagtataacttctctcttcttctttgatatttcctttgtgattattcatattatttcctcctcttcgttccctactcgcttcatctaccttctttcaacaacatttatcagtggcatttgtagagacttaaaatggagacttgaaagaacgtagaggtagagaggaactggtcagtatcacatgtcgagcagaacaccaaggacaagataagaaaaggacaggtaggcacagataaatacaaatgacaggagcataaayatatatacaaccttttggatgagtcatccttcctaaggccactggagatttttttttcataagggaaattcagacctactactccctatgttaatccaatgatttcctatttcccagaggataaaacccaaactattttgaattgcatttgaaatcctttccaatctgttgtcattctgtcctactagatatttttcctgctacttcccaccatgcactccatagttcagtcacttcaaagttcttcctcttcttggaatgtaaccatattcttttatawgtctcagcccttgcacatcttggaatgtccttttttkttttagttccaccagacaaacttctcgttctgaggacccggttaagtgagtcttctgtaatgtctctgatccctccaaaatgaggtatttgttccttcttctgggctcctacaatatatctctctagtacctggtttcttatcctatcacttttcaatggtttattttccatttatatttcttgctagactgtggactatgggaagttgctgtcttatttatatgcctctgtatgtctgtctggcagtcagtatggtacttgacacagtgcaggtagtcagtaaatatttgtaggctaaataaaagaggtagtagacacagaactggcaacttctctggttcacmagccaattttagtatttctcctattaggattgccttagagtcataggctaataaaatttcagtgttagaaacatacctcattttacagataaagaattgaggccagagaaaagggattttcttttctttctctttcaggtcaaaccatgattctgtttccttcagaacactgtggcaaaatatctactacttgaaaggaagcttattgagaaaaatcctgctaatttctttccctcttatggcctgtcttccagataatttctccaaacacttcttatttaggtgttctttctagaccagtaattggggcataagttgatgctctgccacatgaatcgatgtgcatatatgtatattttagtcatgttgtgttctgttcagctgctagatgttcaaaccaactgggtttccccttagttaccctgtttgtttgctgtaacactttcctgttggtagaactatttgttctttcataataaaattgagaattttcttgtaaaatrtatttttaaggtaaaacaatgtaatgatttgtcctggcattctataattttgaaagtcgttgatggcaggagaatggcagagtggaaggatgtctcctagttatagttttattagtaatgtgctgatgtttaatggtttatcaggactgaatttatttgaaaagaaaaccatctaatgtggtcagagtcatcttttgttcactatggctctggccctttttggggagtaaatcagctttttatgtatacattctgcatgggagctgtaataagtgagcacatgttgcaaatgctgtgaccttcagtcaactagagaaagatacctcttctaatcaaaggcaaaagccacgatctttcttgttgtaacttactgttgacacaagaaaggccagagagattgacatcaatctctatagaaaccattaaccaatgctgaataaatctgcagcattgaatccatatgcatgcttgcttttattattcttgacctatgggcacacttcagcattttgtgggctttgttttaaaaggaatgtttaaaatgtagctagttattatgggatttcgttggtgaaataaattgtttgggtagtctaaataaaagaatccgtattattttgcatctactaagcattatttgtttaggtgtggcttggtttgattccagattaacacacagygaaggctgtcactttagctgggtgtagcaaaaaccaagtagttttatacatgttttccaaatgatgtgcaagcaatgtgtcatttgattctaattgtgactttattggcttgtggtccctcttttttattctttaaagcattaacaatgactgtgttggctgaaaagacatacgtctttaagaattccatggatgcccaaaactcagttggttataagtactaacaattgccgaccgtacgcatagcagaaataggctctgtaaatcagagcttcagtgctctgggcccctcttccttaattctcccgcacagaaatcgtatttctagttgaggagggtgagaaaacaaaaatgcttttcatttcattctgtgctgtacattttccagtctgggtgactaaagctggccagggtgcctatttttggaaagaggaattaagatactttggagaaagtagtgcactgtgtgctgacattccagatggccaaactatagtagtaccaagcccaagtttttgagcctttcgtgccaatgatgacctcatgaggtccagcctggagaaatagagacatagttctccaacaatgatgaagaatggcttcttcctttcatatttctattgagtgatctccagtgtcctcctcttttcctgtctctgacaaaattagccttttataattaacaattgttagttttttggcttgtctttcagacttctcttagagtccctttcaccccatctacttattgtatcctctctaccaaacagaaaaacttgtgatatttttctctttggcattcctgtcttttcctagcaggcttttttaatggggactgtgggagattttacacttgatttgttgaatctgaactctttgctgtaaactctcaccacacagaagaaactatctttataaatgacagaatggacctggcctgaatggcgctttgtttactgttttcctaaaaggggcccctctatatttcatctgtcaaagttgcttttctttctttcaacaatgcttgattgttttcacaaaaattcaggttccatagacaggagaattctgtattatattttcctgccaaattccgatctctgttttccttcccctgtgctcacaaagggctcataacttactgtcaactgtgaggcaaaccacaaagctccactgttgctcagcaaataggctctattggatgatggcttgactagcttgtaaagtttgcttaactgtagcagcagtggcagaaggtatgtggggtactgtatctcccaacaggccaagagatttcacttctttcatttacttttatgtttttaactcctttaattgttgaacaaagttaacagtgttttgtttagcaaattagatgttgcttaaagttatggctacaattggtagcctgagacttggcagagattaattagctgtggggttgggttttttttttttttggttggcagtcagaggtttcttgtgatttgggaaggtgtcaaaggtgttatgccctcaagttctgaagttctggctgatgtggtaagagaaagccggattgaagagtggaagagcagccacttcatgtgagtgatttgtgcttcctttagctgtcacaggtcttggctgtattactttaccttttaatttttctaacttcaaagcctacctgattgggtgggatgatggcttgttaagaaaagcttatgttatggtaataaggtaataacttgaaaagcatttttgcatgacatttgtaatcttgctagggaattgcaacagactatttaaaaacagatttggttttcctgagggttgaatatgcatacctttatttgtagcatctcgtagatttttaacatgtgattaytttttctgtataatctaaggtcctgagtactattatctatgaggaatcatagattccctacatgaatcttttcaataaaatcaatctttccaatatacacggctagtttctaatatatgctgcatctgataaggtattttatgcactatggtaaaagatgtttttactaatgaaaatatttaatcataataaacatttcaaagaaacacaactgacaagcagaccactgggtaattrctgatgtgtttttagtaaaaacttaaaattattaatgttcataagctgctataactaagcaagactggtattayrttgagatttatagtatttaatgctataactatgtattgaaagtattatttatataaaactatagtaaattaaattgatgattggcaagtgcattaaaaatagtgctttatcaatgcttttcaatttactcctttttattctgcgatacatttcttttgaatttttctgagtaacacacaccttgaatttgttttccatcatgcctgtcaaagttcaaaatattaatttgtttctttccttatccagctttcctagataccttattgtttgtgagtttggtctttaggcaagtttatcttgatgatggaactttcagcttcaaattgtggaaatagtgatctcaaactacacatggaatagtgtgtcattgttctaagctgtggtacagttaataatacctattttgtgataatgaattgaccagaataccaaacagttagtctagcaaatctatgactcctcaagttgattttctaaagtgaattgtgagaggagaattttaaggtaagctgctttcaatcagctcatgagaatgtgctggggttctttagcacactagtagcaacttgattttagacctgatttagaaataaaaaaaaattgtgtgaaacaagtaacattttggaacatttagtgttgggccaggggacaagaaaataatcaggctttgaaaggtattcatgtatttcataggatagggtagctcagactttttatttattgtcaagttaatttaagctctggtagcaattttagtatactgcaaggctgcttctgtttaaaaattaattctgagcaaatgggttacagtctccaaatacttggaccgttttagttgaaaatcaaggaaagaggttaataataggtggtttgaataggcacctacagctcaggactctattgtccttaggaatacagttatcagcagcagatgctgtaggctttggtcttccctgtgtaaaaagtgattccctcctgtccataccccttttgagaaacagtaacaatatatttttaccctgtgctttttattttcttggcatggttctygtcattagttcactcagcactgggtcacgagtatattgggactggaaaacttatattccgtggaatttttatttattgtgatgtgtaaaaattcagaatctttttctttaaggatttttatttgtttttgtttgagtcaaaccatttttctgtcaagttttctttaaagaaagttagcatttgtttcataactaccaaataccaggtatttgcacatatatcaaattaatctcttcacaacaacttttcaaggaagatgtgttgtccctaattttatagatgggtacatagagactcagagagttaagtaacttctgaagttcacagacatagtaaatgagatttaagtctttcctctaaacctttccattatactgtacttttccttctggcaatagatcctggtaagactggtagcaagcagttttccagttctaggcaccatggatgcaaataaagtattacttttgaagaaatctaaaaagctggtagattaggcatgataaatgtaaaagtttttcaggggactactcaattttgggaaatcgtgaggtggaggtggtggttatatgagaagaaagaacaggaccagataaataatgcaggattctttcctataactaacaccacagcttgggaaaaccagaaattctgtaccttggtaggtgtgcaaatatgtacttggtaaagaatcccttaagtatgcaagacagcaggtagtcatacttgtcttttataatgataactcaaacaattctgtgcaatgattcatggaaacaattggattctcatgttctcctggagctgtttatgataattccagcaaatgcaagtgagaaatttaaagcaaatagctataagaaagggaggaggtggtggaagtacagagggagaaatacaagatagcagcactttagttatttgtgaaaccagactgtttggtgtgtataaaaaaatgtggaaatttgggttggtggtaaaaacctttcttcagctttcacagacaattataatttataagaattcatgtcctcatatgagaggcttttctatttcttttcctcagaagttaggatatatgtaatgttatatagtagtcatattttaagagggtatctaaattactctgcattccctgaaatcagctctagacgggtagtgtgttaaatacatattgttcaagctcctcatcttgttttctctcaaggctgttctcaacaccgacttttgtagtgaggcagctccagttttgtctgatatagctggtgtggtttctctggtcagagatggaaggtagaaattggatctcatatttctctgggccttgaaataaacgggcagtgacattcttattttatttcataattgtctgtgtaagaatataattaaatgttgatcatctaggctaaccagaaatagcatgctaggaaaagcatggatagttaacaaccaacaaatatttgttagaaaattactgtgtaaaaactgcagtgaacctctcagccttgtgtgtcagtagctttaactacttcctcaaccaattttgttgtcaaattgcccagaatgacagttaaaaggattggttagagaattacctgctctatgtttctctctcttttttaaagttgttaactagtaattacatatctcaaactgtagaagtacacagaaaagaaaaagatagcaaatccttttactaagctctgattaaatgagtatttagaatatctaaccagaatattcaaaataaaattctacaggaatggtataaattagtaaagaataattcagataataattgaaaatagttaataatttatttaatttagatttcagacacttttaattctaatagcatctgccctggcattagaccaacctgagttgaaattttgccctctgtatttactaggtatgaccttaagcaagttttcatttttattgttttaataaacagttttgtgccttggctttcttatcagtaaacagggataatgacattatttaacttctagagttgctctaagaactaaatgaaataatacatgtagcagtgcttagcacagtgcctgcctggtactttctaagcatctagtaaaaattatctatgtatcttttcaaccatctcttcaacatccatccayccttccatccatccatccatccatccatccatccatccatccatccatcatctgcccattggttcattcatttatccatctttttttatgtttctgacaacataaattgattattttgggaggctttctttgccagggaatatgcagaacttttaaaatatgaggtgaatttattgtccagrgtgtgtgcaaagaggagacacccccagaaaccagtttattttaagtcctttttcatggctacttttttctggttgaagataacaccctaaatttatttctgcctattaattcaataatatttaaataattgggaagtatttactgagtgtttcttttcacaaaacattgttctaggtattgtgggaatgcagagaaagctaggattttgttctcacccttgagaagtttgtaatgcggttggggttacttagaaaatataatgatattatacatttttaaaagattatgtgaggtaatatccattaagtgttgaatgagtgatataaaaagtaatttctcacagatcttattagaggtgtttagaagaggggtagatcrtagttamctggaatagtctcagttggtttcctaacactaagaaaggaaagtgaggaaaatagggagagacaggcagagcaaaggctaggaggcaacaataagtgaagtttgactggtgaagataaatgtataaagattggttgtatctggatggagggcctcaagtgccagggtcaggagtttggactttattttgtcatcrggggagagccactgatgttttttgatcaggagagtggcttgatgaagggagtagcagttaagattgatttggtggaggagatactaaaatagagaaagtagtttagggtctgttgtaagagtttaggtatgaggtgtgaaaaagccctgtgctaaggtgattataagtatggtaagagagatgagcataagaaacattaaagaatagctgatggagcttcatgactggctggcattgagaagcaaggataaaaatgaggaggtggatagagtgttcatgttttgaaccttgatgattctgacagtggtactcttctgggtgtggatgaatgaggggaggtattgaggaaaatagtgatgaatctagttttaaggtgtttaatatgaaattgcagagcatatcttggtataaatacttaacagtcatttgaggactgttggatttctgggagatgagagagtttagtgttggggatatggatataataatcttatgacttaatgagatgcttgataaaaacagtatagagaaataataatgtttagattggcagtattaacatggagtggtattttctgtgattatctattcactttaatttaaaacaataagctatttgcctatctctccctctctgccttttcctccctcwttcccatagtattgattgtctacgatgtgttgtgcactgtgctgggcactggggatccagcaatgaacaagacagatgatccctgtcctcatgaaatatacagaattaacttgttttttaattaaacaaaatattttaatgagttctccttttacccatttaccatgagcttatgctatgtaagcatttrtctcccagggtctgaaagatgttctctgacaagaagtttccttttcttcctctcgttgatactttttattttagtatattgtaataaatactctgtaggagtataatttcaggaattgattaaattactcatcatcgaagtttaggaaatactgattgcaatcccctttgcctgggaggtttttattgtgctgagcttataagaagtgtctcttggaaaaaattgtattatattatttgaaagttctaagaacaaggaaaaagatgtttttctaaaaccgtcttatttcttacacccagacacttctcttaatgatgttaagtttatctcaaatcaaaataaaacgtgcagctagagactggacttcccctttctcctgtcgcttgctatccttgttttccttctgatttagccaccgatgttcaaccaatgtcttcatctcattctttcctctactccttcgtaataaaatagaggaatggagaaagaggaacacaatgcaagactgaggaacaccagttgagactgataccagatgaaagcattattctaatgtctggatttgtattctaagattcaagctcaggagagcctatgctcttgatgagcctcaattcatttcactgtcaccctggtgtagtcagtgcctcccccttttttgctaaactggtctatttttgtgttaaatgatcataaatgatgttatttagaacagaagtatctgttctaaaattggaatggaatattaggcatatcaggcattagctataggaaatatttcaaaaatgaaatggttaaaatgggaatatcaggcattagctgtaggaaatattggtaaaatggcatatcaggcatatggtaaaaatggaatgtcaggcatatcaggcattagctgtaggaaatattttctttcttgcttgctttcccttccttcccttccttccttccttccttccttccttccttccttccttccttccttccttccttccttccttcctcccttcctccctccctccctctctttcttctgttttctttcctcttcttatttatttatttatttttttgacagagccttgctctgtcacccaggctagagtgcaatggcacgctcttggctcactgcaacctccacctcccaggttcaagcaattctcctgcctcaacttcctgcagagctgggattacaggcgcgcaccgccatgggtggctaattttcatatttttagtagagacagggtttcaccttgttggccaggctggtctcaaactcctgacctcaagtgatccacctgccttagcttcccaaagtgctgggattacaggcatgagccacctcagcaggcctagctgtaggacatattttctgataaaaatgacattattgatggaaaaagcccctatatttagagtatttggagaatgattagagtttttgctgtattagaaggaatgatataaatttgaatgtcttaaatcttgagttagttatgaaataaaatcacttttctaagagagcttttaaaatgcagtttgtttggagcattatctatattaattatattcattttaatttgtatcttaggaatctttggagtgcgggagaaccatgtcaaattttcagtcctttaatattaatttagcttcaggttactgagatcactttggtagtgagccaatatggtcaccaaatttggatgagaattctagatgctgagtgtctgaaaaacagttgtggatatgtgtcctatgcttggttatttttctaaacttgtgtagagatattaaatcactttcatgagatgaattttcagcatcaaaaatataagctactttagaagacgaaaacgaagcgtaactctctgttaaagaaaaattaagacaaaagcttttgaagttgaatcctgcctgtccttttcaaccttcaggaaggttgctaggctagaaagacatctctaaaaacaaagtttttataatggaaaatgcgctgacataccctttaatgatataggttcaaatggcagtgatataatttgtaggtctttgtgcttggaaatgtctggaaagttgtagtgctcttattaatatttgtagtcactttttatgaattagtatttcttgttgtttttcatttttatttaatttaagatgaataaatcttattattaaataacatgaagattgcatcatagccttcaggattaaaatgcactccttttttggggaagaagatagatgtgtttcctctgttgaaaaatttagatttgatattttgttttcttcatggtaattatgtttgcactttgctgatcactagttgtgcattattacaatggaaggtgacaatttgattgtcttcaattggagaaacaagtaattttatattcactaagctgtcaggtaacactaactcacagtactaagagctcctggcaatgcagcttggcacctatatttaactgctttgatgcttgtgtaacctctgctgaatcagaagtactttgcctgctggaaatgattttcaggcttgtacaatgaggttttcattaagtagacaaactgaaaatgaactgcaaagccatggttgtttttctcctccccttttaccttctccccttttcccctcctcttcccctccctttctactctcactcccttcctccctccctcttctttctcttcttcttgtctgtctttgaataggaacctgaaacttataccttatttcatcacatgaaagagtggacttggtagattgccttatttagctaaaggaggacctcagagattagtttctttatataaatttgttcagtgtttgtgtgaattttcatattttgaaacaatctaaagtatcaatattcatttttctctttttttctggaaatattgaagagggaaattcgagttaaggatggaaaagtatacagtgacaatttcctacactttgtctctgagaagttattgttctggtttatgatttttattaatataattggataagatatcctgtacttgggcttccatattaatgggccagtttcacgctgacagagagatgtctgtttattcacttaaaaaattgtagttctcattttatatgaagaggaaattcaaagtgaacttacataaataaattcattctgctattattttagacagctttctttcactccagccacacagaggtctttcgttgagctataaagtcattgtgctagattaaaatcctctaagttagtgtatatttatagtagccattgttaggttttactcttattgttaagtcactgaatttatttataaaatctgggcctggctttccaaagcaaaaattccaaaaagttattggtagataaactgtgagaagaccatattatttatatcaagcaaaaagtatagatagaggttacatgaagtcaagttgttttgatcccaggaagaaaccagatactcagggacacttaataattataggttttccataggcagtcagtcagcaggccagtcattaggctggctgcctgtctcttccagcagatactaaccaattagacagaggtagttacgtgatgtaacattatcaggagaaacaattcatgagtcaaagcattccaagacatatgagctctagtccaaagaacagtcttaagctacataaagtgacagcaatattgtcagctaaatataaactctagaaacacaaactttgatgacttaagaagaatctgttccaggtagttcttgttttgtaagaagctcagagggcctttggagacaattttggtgctttgctgtgaaaaattggacccttagaaaagtcagaatccattaatttaagcactttcttagacacacttcaagggcttcaaatgtatttcatttacctcatctccattgatttgacagctaattctaatcagtgagttttcttctaatagttactgtcctcatgtgttaccatatctgttctgaaagtgctgctacaaactctagaagataggtttataactttccaaggtaattctgaaaacagttaccttcttttcacctgaattttcttaattacttaatggaagaaatagaaaaatctggcagaagcagagggaagtttggaggtggattgggggagaggaggtggtggtgttgtataaagtaatacaaataattagtaagcaccttccgactttactggaatgaattgaggaatgttttaaaaggaatgtcttcattttaatgtctagaattaggatgtaccatgccatcctcccttccccaagatccttgaatgtggaaattagagatagaagaagagggttttaaaatcattctttgccctaggctgggtggactggtgtcctttgtagaggttcctgggtattgtgcattttggcaactaaacatatctgttactcatgttccttaagatgagaggcactgtgatatatttttggaaaattagttgtttatttctcaayatcagctcaagtacagcattatattaacagtgaattatctgactgaaatgagtctaccttggtagcctggggctgagctgcaaaaataaatgggaatgttggcctgaagttttaatttttttgaataagtagaacaactcttaaaatgttgctttatgttaaaaacaggactttttttgaataaatgtaacacacctggaaagtgaatgccatttgataataatcataaaaataatggaaatattttcaaaaattcagttaaatatattgctatgatgaattcagtggctctttttgataattatgtaagcttcaaatgacagttttgaaagatggatacttttcaagctataataaaaaaatgtaattttgagtgattatgccttatgagaaagtttaaaagtttgaagttgtttaaaaataatcctgactttaaacacataaaaataactgtttttaaagaataatgtcaaatcagaaaagttctagaaaatatgatattctgagatagaagacttaatgtgcacatatccagcattctcatcattttataaagtcttgggccaactaattttgatttattgttgcagaacagaaaataaatttactgtctgagtaagtttgtagtaggccaaacattcagactttgtactggtgttttggagtaaaataattatgacctttctagmggtgttcgtactgacttcctagagaacattctcagtaactggaggctttatctccagcaatctcatttccaaaagtcctaagcccgaagttcttcccaatggcctggcatcctgggagttcacttgattgttgggcagagacattttaaactcagggaacatatgatgggaatttagttttatgtgtcccaaagatatataattctctttgaaggttttacttgataatagttatgccccagaaaaccatcttgtttaaccaatgtgataagttgacaatgtagtttttctctctgattataatgtactctgtgtagtcaatacactggtaccatgtgagtgtaatttcctcttttattttatctccaatgcactgtattataaataaacagttaaaaaaaacaccaaacaaatctgttgcatctccttttaagattgtaccactgtagacacttgttctagtaaagtagaattgggcgcatttgattgcatttaaatttttcatgcttcagcagtttggctgggagcacagtaaagaaaaatcccatgagcgaggatagtttagaataatagaacttgattttgtgtattatagcggcaacatttgcgctgctttagttagggttgtgtcagcacttccattataaacccctgttttcagggggtataactagggagatttttttttaatacaaattaaaaaaacaattcatttgaatgatttttaagttataatagtgcaaaaataaaacaaagtaaagtcacatcgaaattgaccatttccacaaggattttgattttcttttacttattagtcatataaggcagcagctaaagtaaggtgctgttttaatatgttggggatgaaaatttttgcaatggaaaattactgactgagcattaaaataaatgtaagcattccacatgacattttaaaacactgaaacatgggtatatttgatttatgagtttctaaaggagagtaactatggtacagtggttatagtaaaggcattaccaaaagtcaagtgccattgaagcttctagaatacagtttggttggttgagtaaaatgttttaaaggggaaagctaaagaaatgaatgagatgtcatcaggattatttaataaagtatttatgcaaaaaatcagtgaatcagatctaataatcagcaaatctaaagtttatttaataaactgcattaaaaacaatttgtgcacattttataacaaaactcaaaactgccacccaaaacaaaaatcaacaacaagaccaaatgtaaaaaaaagatgtaaacaaaaaaaccccaacaattctaccaaaaggaaatgctcaaggaaataccttgctaaaaacaaaacccatctttttcaccactagcaatgcatttgagaactataataaagtaaaaacaagaaattatatgatttggaaaagtatttttggaacaaaaaatgttaattcctttgctaaggaaagggatttcaaaactgagtgtgtttttcttgattgttaaccgttgttgtcctacctcccctgtctccttttcctctaacgatagtgtgaactgagaatgaacactcagatttaatattgctttttttggcagcttgtgttttatttgcaaccttgatacacatatgtatttgtagatgcaaaataaaagacaaattgtgagatgttataaataggtagcattcctgaatggccactggaggaatcaccagaagactgttgatgaagtagaggtgaagcctttcctcactaattgtattcagcrtgtaatttctaaacttccctctgaattttgattttcaattaacactccccatttgaagataattttctatttaatgtaattgcaggaaataatttattggctgattaagactgaggacccagccttccttaagaaaacattctaacaaaccatcctttaaactcamctcatagatttagtctatttttacagctgcagagttgtatttaattaggattgtgcactattgttcactggtgcagtttatagttgaaattattcttaagagactgttttcattttgagttttgtcatgattaatttaaactgaagcaacaatcatagacattgctattggaaggagccaattcactttataataagaggatgtttgttgagggaagtaaagtcactctgatttttggatcatgactttcaattgtattgaactattttaaaaagcagaagtacattcattcttttgtttttaatgtgaatgattattgatattgtcagtatctgaaataggaaatcacccttgtttgtggcaagctcttgataaacttgcagaacaattataatttgcctggttttactaatagtagttatggggccrgtaaagtaagccatacagcaattctcttatactaagaagcatccattggctaccatttttcataattgtgtatatgtttgtccatttgttattattgatataaattgatcaagaatatatctgatttattgatatagcactctttagaacatttaattcatttcttctcaaagaaattataggcattcttttgcattccctttcccccattttattttctagtatcaaatttaatagatacaatttttgttacttgtagaatgattattataaattggtatcagcattttaatatgtttcaaagcacttcaaaagcctgtaatacttttattttgaactgcgcataattagattagctgatcttatattaatttttttcactgtaggatactaaatctgagccccctcattaattgtgagaaatttagcattagctgttaaatcctatgtgaaacatgggctgctacataaaaactactgtttaaattggaattaacttaattatttttctttgcacttgatatttccttcactgcaatattcatgaaagcgtgtgacagatttgtaaatttaactgttaatctcagatttctagaccctttaatcagtatttatttgtctgtagaaacagtactagcaagttaatgatttgctaatttgaaaaatgctcatgtggtttcctatgttaactgatttgtgcattttttaaaaaatggtatgaaatcaattaatgttaaatagcaattaaggtggagattttattcctttcattacacagcagttttagagctaaagatgtaataaactaaaaacaatgtaaagttttagaaaagtgctcaattccctcttctgttaagttatacactttcagtggttttattttctaaccawtttgccaagaaattcatcttaataaaatgatattctaaacattttgaaattctatttaataatcatggttttctgattttatatgagagcacagaatggagacgttgtcatgtagcgtgtagtcaatgtttatttgtrggcatataaatgaatgttcaatattgtatttggaggttttaaatattatgcacagtaggcattttactattttcatggtaaatgcttcgaatcttgtatatacttcctaatataaaatagaggtatagctatttcagatacttaattcaaatgctacaaaattgccctaaaactaatctaacagtatcagccactcaatcaatatgtcacttaaaagttaagttacaacaattgactcatttcaaaggtcttttaaaaagctttagatggcactaagtagtgttaggcccagccctaataatgcaaagtgtaaacaaagaagtcaggatcagatttgtttaggactttrattatgaattatttactctcctgattatattttcctacatatcccccttcttttgctcctacataaaccataggagaaagttggataattgtgctttcaaatcatcttgcaaactgactcatttgccagttcattgattcatttttttccattgctaactatcaccctaaatactttcaagaagcttataatctagttaagaaaactaggaggaaaaatatacacatacacaccctgtccattatgaaaacttactctgtaaaaaaatcattaatggattgtaagagagaaaatatgcagtaattactgggaagaggtttgctgagttaaaagcaaagagggaaagaaggacacataagccaggagttctttttcrggggtttagagtggaccacaaatatctctaaagttaaataactttccttctttcctgaactagccaaatgcaaggattggtttatggtttgttattgacagccatttttaatccgttctgttttttttctgcagaagaatgtcttccaagcaagccacctctccatttgcctgtgcagctgatggagaggatgcaatgacccaggatttaacctcaagggaaaaggaagagggcagtgatcaacatgtggcctcccatctgcctctgcaccccataatgcacaacaaacctcactctgaggagctaccaacacttgtcagtaccattcaacaagatgctgactgggacagcgttctgtcatctcagcaaagaatggtgagcctttaaaatctgaccactgccactaaatgcattccttagaatgtcctcattataaatagatattttagggaaatagatgaccttagagttatttttgtgtagatcatgaaacaactaccaggtacatattactaagatactaataactggaaaaacttgaaaaatggtttgtgatttagtgtatatacgtttattattaggtcaatgtgccagtaatatattttatcgattgatttttgtggggggattggttatcttattctatgaatccatgaatttaaggtggttaacttggtaatatcataaaataggtatgagcaaataaagtatgcttatgtattaatattgaaaaatttaattaagcaaatatgtctgtgtgaatgaggtcatatgttgaatacaccttcaatgagaaaatgcaggtatttatcacttttaatggtcattcttgacttataataaagcttttctcacttatgtgcttatatattaatttcaaaagggcatgcaaacctcgtgagaataagtcaatcagactacaggagttttctcaaaaagtagaaaccacatcaaatacatgcagtgtattagccagctttcccatgttaaattccatctctaaccatcagaacagaaaccatagtcagtgacattaattatctagttcaaagcaaaaatattcaatttttttagcatctagaagagattaaaatgttaatatattttattagattagaagttttaaaccccattttgcatttcttaatctttggctaacaaaaattaagttaatgaaaattattttaagtggacactgagaaaatttttatttcttaacaaaaataaggtaatatttacaatgcctttactactaataacacatatttaaattcttatttgatgcttaatrtctcagagacttaattcaataatttatgaaggcagacatttttctttttcagatgattttgcagacacagtcaatgctctgaaacagtaggtgagaagcagaggattgaaaggtagtttctagactaattttagttttgaaagggatcaaaattgtacaattcgatccactggaagatttatttttcttgagtaggaagaaggtaataaagcaagtctgtttttctgattgaacttaagttgttcattttaacacctccaaggtgaaatagatatccagtcactgccacttgcgtattggcaagataatggagcgatgtttcatttttatttaaacaaatatttattgagtaccatctatgtgccaagcattctattaggtgctgactatatagtggtgaacaaagcagacatgatgcatgccttcatggagtttatagtctgggagagggaatagaaattaaataaatatatacacaaatatataattaaaatgtgatgtttgctatgtgtgaggagaaagaacagaatgctatgtgagaacataatggggcaaacctaatttagaataaatggttaggaatgccctcactgagccaaggatggtaagaactaaccaggtagagtggaacaaagagtaaaactgcagagggaacagcatgtatgaagtatttgaagtgagaaagttactgcttaatttcagaaagtaaaagatggccttcgtcgctggagagttatgatgaaggatgcaatataggataagatatagttggagagattggtaggggctatatcaaacaggaccttggagataacattatggatgtgagatttgatctaagttcaatggaaaacgtttgaagcattcaaaaacatttcaaacagataaagtctggcgtggtataatgaatggatgggagagagacaagagtgaaagaaggaggacccactgggagtctatttcagaagtctaggtgagagatgaatggcttggattaatgtaaaggaagagtggctagagagaaaggatgggtttaagacatattttggcttttatgccaaatctagtcatagacaaataaaaataactggactggaaaatatgggtagaagaagaaataatacagttcaaattttatttctttgagaacactatacttatttttcctagaaaaattttgtttgtatcttgataaatgccaagttactttggtgggttattatcaaacttttatgatctaaaattttgtcttaaaaatatattaataattttcttaccaaatttatattaaatgtggtttatgatagtataaaatagtttaatggtacaaataagttaaatattaatgtaaaagaaatcatacttgctagacatgttttcaaactttcactttcttttgctatcaaacattgctttccactggagcctttgtgtattccgaatgactagaagccaaaatattttgtttaaactcccactctatagtatttcccagctgtgtacttatatggtgtaataaaaggatttaacaaatgggaaatagcagctgcatttggaaattccctttgtgcttctttttcactggatagattcaatattttgtaacaactgtaatatcagacctgtaatgacttatactgtaagtaccataacacttacaggaaaaaaaacaatagaaggattttaagtttctgggcagacctgcaaacctacatatattgtgtgtgtgtatgtgtgagtgtgtgttggagtgggaggactctgctaatataaaatttaataaacattttacctcattctactttaaaataaatatgaagtcaaaaacatgtttatgaaatcaagtaaaacttgtagttttttaatggatcatattctgtacttagagtcgcaaaaaatagttgtgaaaaaataaaacttaaaagaaaatctaaaaaataacaataattttttcagcacttatacagtttccattgttatttactttctgtaatggccctcatggccytcattcatgaactgttagaaacaagccctaaaagtttcttatctcttgggtacaggaagggttttactttgaaatgtcatgaccacagaggaagttttctgtcagagaaggtgaagacaaagcaaagaagctctactaattcccacttcctgattagaaaaaaaatctttaaatgtgaaaattctgattattttgaggtgacactgcaacaaaatatgagaccacataggttcaaacaagaaaaataatttgtaatggcataagcaaagaaggagaatagaaattttagaaataggatttcaaggaccactttgagataaaaagttttagattctgattttaatcataattacctatttatacacaccaaattgttgaattataaatttaatgtgctatgttaattagtgagagccatttgaaggttggaaagttaatgtaaataagattcactatcctctatccacaactgctaccactttcatcatggcacccagtgtgccaataccttttttgcagaggaatgttgacactgtccactaaaatgtgcttttgttctcattaggactgactcattaggctggaatacattcacataatttttttcatggaaaaatgtacagsatattattatttttgatgttaataagcatggagaggaatatttttgtgataatgtttcatgacctgtatatgatattgtgtgtaatrattatctgctagattgtaactgtagaaaggacagataaacttatatattgttggtgatcttgtctgcagattacatacaattttttggtgcaaattatgtatagctacttgtatcaaacagataaattgcaacgtacatgttattttgagccttcccttccttacttttttttcttttgctttagagtataatttagaaakgagttattatcatcactggatacctgagtgtatagtacctactaaagttccaggcacaaggactaacttgtgaataatgtagttaagatccctgttatcatagaacttatagtctagtagtatggcagacaataaagaagtcttatagagtgagacaatttcagacaatgataagtactatgaagaaaattaagtaagaacatgtgatagagaattactgctttaaaaagactggggaagttattttggaggaggtgacatttgagctgaaattggaataaaaagaatcactgtgcaaagatttggggaagacacccagtcagagtgtataataagtacaaaagtcttgtagtttgtatgtttgagaaacagaaaacaacagagtggctggtgaggcagagaatggtatgaaatgaaatcagggaggctgacagattacagatattatggagtctcataggctacagggaagtgtttaaactttctttcaagtgtaagtagaagccattggaaaattttaagcaagggagtaacatgatttgatttatgtttttaaaagatcacattgcctgctgtgtagagagtggactgtgagagagaacatcagaaacagggacaccgattaggaaaccattgcagtggtgcaggtgagagtttgattgatgataagcagaagagtgaacagttagggaggttattcattgaagagttctcagagattctgaagaagacaaaatttacacaaagggtggagacaacgttttaagtaatgtacatgtgggcagaaacatagtcaagaatgacaagaaatgacgttggtgagaccaaggagaggagggaagcgagtagaaatgctctcggccagagaatgsgccgaggtgagagacaagctttttgcctaagaagcaactcttagtaggtggcttctgtggtaggccatggagatgtgggtaaggcaccaacactcttatgagatacaaaatgtgatgattgtaagtgggaacttatgtacatgtgtacacttacacacattcttatattgatacacattttggcaaaaatatacatgtggcttttaactactagtctaagtaggtagaaataaccatagtggactatcagccccagaatatctgaacttcttattttagagacctacttaaattcctccaggggagtttttatcttctagaaaagttttaaaataagtttccaccttaaataaaagatgtcaataatgccctttgttgtaattgaatgaaaataatggtaggcatgctgagatatttaataaataactattggggaaaacaccttcttgcttgcaaacaatttctactctgcttctctagctttcagtctcatgaagttgctaatcaactctggagtgttttgtgtttttcacttggagtcataaaattgctggtgtggactttgtaccatttctgggaatggagctattgtcattacatgataacaatccaggaatttttagtgaggatctaatcttcagtcatgctgttatgacagactttgagaagatttctaatcttgttattttagagaagattttaaaaacttgaattgttgccagttttttgtaagattttgtcatttaagatagtaggcagcaccaaaatgaaatttatttccccacttttattgagactgtactttagaaagtgtagtgaaacccactcgttcacttggttctaactagtgtatagtcatagtcataactcctaaggtaagatttatgtacacctttgtgatacctgattggcctatgaagcactggaaaaaagtccataaacctgtaaggtttagacttcttgagacatttagttactacttctctcatttttggattttggaaattcattcaattttagtaaagttcaagcctagatttctgttarcaggtgaaaatggccatccttaccttgaatcactgaatagtattttctaggaagactcatgggagatttcccagttcctgtaactttgaaactatatttgcatacggtactatctctttttcaacctgtttcagaaatttaatgacagaaatttatttagtatttgaactaaaaaataaaacattttattgcatggaatctggcaaagctcttgctgtgggtagtgaaatagacagcaaatgttgtctagtgttgacacattgatttcctttatatttttacaccctgataatgtgcactgtcctttagaaaaagtatgtatttttaaaagttccccaaatctaaattgtttaaattaaacaaagggttactggtatgatacttggaagtgtctcgatgtttatggaaatataaattattttttcatgattcttaattacataatatgcctttctaaggataatttttggaaaaattttctttcttacctagcatattattaaaatcttcatcaaaaatagagacattaggctaggcgtggtggctcatacctgtaatcccagcactttgggaggctaaggcaggtggatcacttgaggtcaggagtttgagaccagcttggccaacatggtgaaaccccatctctactaaaaatacaaaaattagccagacgtggtggtgcgtgcctgtggtcccagctactcagaaggctgaagcaggagaatcgcttgaacctgggagatggaggttacagtgagccgacattgtgccactgcactccagcctgggcgacagagcaagactccatctcaaaaaaaaaaaaagtagagacattaacatgctctggaatagttggcttttttcccccttgggcaagaaggaatcaggtatgcatgctgattaacacactccagtcattaacatgtgattatgtgggctgcgtattgagcacctgccaaaatataaaaatccagtactttgctacatctgtgcaaagactttttgcatttcttttgtattttgacagataaaygaaaatcggacattagtatcttttttttttcagtgaagttgtgtattcagaatgtctttaaggaggtgtcacatgtcatgtttatttttattttaatcattaagtctgtataagatccaatgactagggtttgtagtgcactgactataacatgaaccccttaatgaactctatcactgacactcacaatttgcaacattactgyatgttcaaaaggattatcttttcttggagtcagccaacgttctcctaatttgcctcagttttatgtttgcctcagtttgatggatattttgttttcatttactttacctatgtactgctagtgtatacctcatagtaatgccagggctgctcctgtggtttgacttttcctgtcaactatccctatgcaaatacttctatatgaccaaagtgtagcttagagtctatagcatttacacacataggaaaagtagctttttgataattatttaaagtaagacttggttactaataaaaaatctagtataatctagtctagcgtgaatctagtctagtgagtctgattgagcaggactgttctactcagcttttatctttcttaatggattcaaatgtcatttgaatgtagctttttttttwaaataaaccttttattaaagttggtcagggttaatcaatggaagctaatcttgggacactaataatttcctgattaaagcagaactctatgagcatgtttcagtctataggtggttctgattaatatatattttcttgtacagaaatccttcttaaaattttttcttgcctagcctctgggtacatcactataatgaaatatgataactggaacaataaaatctgcacattttttcataatgcttccaagcaacatgaagaaaataatgtttatattgtatagaatgcagttgtttatatgactaatttgaacttattgtgattagaatgaaatattaatctcaaagtccttctagatcagcaggaataagatggagacaactgtgatacgcagcatattactttgggaggaggaacccaggattgtgtctgcacaccttgagacctaccttctttaatttggaaagggttgctttccataaagccaactttamtataatgaatcctacttgcatcatttgtttgaagatgaggttgaaagggctgtctctcgttattcagtcaaaccacctgcatgaagcaggaaagaccctactctgttccctccacaaatatatctaatctttcttgaacacctataatgaatatgtattaattaccttgatactaaaattattccactgtttgattgtcctctgcaaaaaagtttccttgctttccaggagaagcataaccttttaaaagaagagcaacttcaagctattattacttttgttaatacagctttcaatgtgatgacatatttatttttcatgatattaacctttactacattctcttgacccctaggcattgttttttaggtgatgcaaattgagttcaataatatatctgtgtaaaccacattctaaattccaaagtataaattacaaacctttgctaataaaattttacaatcaggttgaaattagaaatgaatatttatgcatttcatttatcttctttatatttcattagcaccctggaaaatagaaaatcttatttaataaaatgattggaaattatttggtaaacttttgctttcattataatttaactctgatttgtttctactcccagtatactgagagtactcagaaaacaatattctcaaatgtctcaaaattctgagaggaagtgtgccctcattcaagcacaggtagattatggtggtataatagaagaaattcttttgctgagaaatgaataattcaaatatttatatgataattacttttatttatcaattttttggtcagttccagtggtgagtaataattttttgcataagcactgagttagccaggattaaactaatgtaatccatgaacgaattcagaaagcttttactcttgagtttagactcaatatatgactttcagttatattaatttatttcatacctggtatgcttctactaaagatgattctctcatttttgttctctcatcgatgtatttcagatataattggattatagtttatttcttttgctttctgaaattaacagtaaagttagaatttggccctccttttggctactgttctcttggatgacacggtaggtcaaggaatgaatctatgtttttggatatttggaagttaagaggggaaaataaaaattcagagaaaagtttttctttccagagagaaaatatgggctctgtgattgtagttgtgtcatcagtccaaggttgtatgttgcattcaggtagaggaatgcacagcttccagacattgtgaggacctgattgcagttagacttttaatttgctgccttgtgttaaattggtgacattttgtgccccgtttcccttttgctggaaatgtacrtagagataggtgggtggatgcatggatggatagatcattgttttataagtaacataacctctgaggaatcatttttagtctctttgtacttgttctagttgtaagaacttaaacaagagagctagagatgttatttaaaatgttctgaattataaagagtttcttggtagcccaccatatgaatttaacatattagaagaaaatttgaaggttctttcagtgaaatcctcaaacttaggagctttactggacaagatctagtgaagagaggagtttgttgagctcacagggtggccctgagtatgtatgacacataaagcaatctgttctcttgactctcttctttaggcaaactgggccttgaaaggacttaactgtcaacagagttgcatctctattaaggaacaaatggatttgacaaaccttgattgggctctgatacttttaatgttaggatttgtgaggtatgaagagcataccatgagttatttcttttcatgtaaaacacactagttactttgcttattacaaaaacaacaacaaacagtatgggtgtcactcaaaggaggatgaaaagaaaacaactgcagaggaggagagcatgaggaagattgacctgacaccagagtaagtggttacctcttaagaggagctctatggaatcatttgagactctccaggcatagaaatgtgctctgtaagaatttgtccaacatctccaacttctgcrtaatcactccctttatttctcaatgccataaattgtcaaaaagacattctttttgtttggtaggggttcctttttttctttttttatctgggggccttagagggaacacaagttacctcctagaaagcctgtgttcatctctgccctaatttgctgtgtgaccttagggaagtcactttatatctcctgacttcgatttcctcagctcaaaaaggaaagatttgaactacaatgactaagcctcttggcacttctaactttcttggtttcaaggttaaaattgggatagccaatttgacttagcttactattgtttagattgagtatcatgtatatggtagtttgagtactaatgaattgccagatgaaaataactgtctagagttggtaggcacatgaaccagtcaatagttgaatgttgtttttgtttgtttatttgttttagatggagtcttgctctgtcgcccaggctggagtgcagtggcttgatatcgactcactggaacctccgccttctgggttcaagtgattctcctgcctcagcctctcctgagtagctgggattacaggtgtgtgccaccatgcctggctaattttttgtatttttggtggagacggggtttcaccatgttggccaggctggtcttgaactcctgccttcaactgatttgcccgcctcggcctcccaaagtgctgggattataggcatgagccactgtgcctgaccaatagttgaatcttgatagaatgttgatttaattgctgggaaattcactatcaggcctgccttaaagctctgcttacatggcatgaaatctttaaaacatgacatctctaaggaattcttagtgtcttaattcttgttgttcagacagtactgagtatattgagtttagggcaccactctttaagagatatataaagagaaacaattggaacacactcagagaagaatgttcagactggccraactgtgttttatgaagaagaaatgaaggaaaaagggatattttccctagatgaagagaggatagaaaggtactgtaatagctgtgagtatgtattgaataactgccattctgaatgtttccatggaatagaaatatagattggaacgtgtttcatatttctgtaaagaagaattttggacaaccctccaaaaatggaatggaccactttgggagctgctaaatcctctattagtgaaagcgtttagggagaggccaaatagtcacttgtcaaggaaattgtaaccaccaccatttaattatcacttactatgtaatgccactgttctaagtgttttatttttattaawtcatttaattcccacaactctttgagataaattctttactgtactattattattgccattttgcagacaaggaaattaaggtgaaaagaagttaactaacttgtctgagcttatatggatgagaggtggaaaagctgggatttaaactggaaaatcttgcccagggcgcctgtactttgttaactmttttattattccatcttctcttgcacagggaattcaagtgctagatgggattgaacaattggagttttaaagacctttgaatcttgagattctaattttgtgtgtgaggctggtagtgtatagataatgcagggcttttctatgtccctgtcttgacaggtttggggatgttttctgtatttaatctattcactatatttacttccatttattaaatagaatgttaatgaggacattcaacaaacttttgggtttgttattttttttctgggaattgaaataacatttaggaaacaacagcttatttttaaagccttaggaatcatgacactttagcaaatattggtaacaaatctattttctgacacatctatgaataattttattgttattcaacagcatagtaatagtgataagtggcatatgttatttcaattttgagaatgttatgtaaatctaatatactagcaaatatcagttttaataaaagaaaaaaatacactttcactatcattcaaaaaatgatacttttgtcatgaataatctgttggcaattagaaccaaatatagcattttaatttatrtatgcttctttaacccaatccttttctttacagtatgtcacattagaaaaaaacatacttttttcctctgagaaagaaccgtaaatgtttgcaatttagtcttcagcatattaaaaaggttagatttcctttgttagcaagaagttattggaaccgaaatcttttctgtcagtcaataacactatagtagaaggtgtcttatatagcacagttggcaagtagttttttgttcatcaagaaaacaaaaggttgtttaaagtggagaatcagaaaaaatgttacatatattgtctgtggtataagttaatgtaatatgtcaaacatagttgtatatatgtaacttatataacataatttggacatttaattgaaactttaaatatataaatgcactgcataccaaggaaggatggggtatagttagtggtgggagccatgtgacctggcaaggaagattgatcactaacatggttgagttgccagtccatggtaatttaaaacataaatgacttttggttgtttttgctattgtgttaacttctttacataaattgtagctccttaattccctccagtcagagactaccaggaacatacctgtagctgaacacattgggtttattactcatttttaatgaaggagaatatataccatagtgaaccatagaacgtcttaggaagagagtgttatatttggacctattttagggtttgggctttcttttggtgattttgagtagggtctaaagaagcagaagtttgttgtagattgagtgtcgtccgaaaccagggcaaatctatgattggatatctcaataaaccttgtctatagggagggcagactaggttgaggataacattgcaactggagaggctacaactaaaatggaaaacaaagcaaaactgacaacatatggtgctataagaatgaatagatttaattcattcttgctactggatacaggaaagggtacaagtgaatagtattctgttcttacagttagactgggcagccggtagggaagttgattcttgcagctacttatgccatttcccagtcatttctcccaactgcagtgactcccacctgtatgtgggtttcaatttcattatataggcaagattcaactcctgacctatgctttctgactcttaattcctgacatctgatctgacttttgcaaccccagcccactgttctcctctgcttgcagtatggctgaccatccacattccttgtctaggtatggtcggcaatccagctgaataagagcggtagtgtactgtagctgctcctggacacagtagagagaatccatatgcagataggataaataagaattggtagtattcctagaaaaagcaaattataaatgctaaagttcctggagctttgtgagaagccagatctcaatggaattggtttgaggtgaacattgataatgaagaaagtaatgtagtttagtatttattattccacttagatgaacaagtatgaataaaaacttaaaaggtgccagtggttatcatgactgtattttcagaattgaaaatagaaaaaaagggcaattggacaaaggacatttgtatttaataagagtagctatcatttattgagtacttatatgctaggcattatactaagtgctttatacatgattcatttctcatagcaacgatttgaagatataattatagctctatcctataaaaatgcagagtctaattcccattcccttgacttttggcaaggcttggtgactyactattgaatagaatgcagtgacagttatacagcgtgatttcccaggctaagttagaaacagtggtatagctttcatctggctgtctctgggacatgcacctttggatctctgagacaccacgtaagaaagaagtttcactatcctgaaactaacatactgtagagaagagaccatgcagaaaggtcatgtagagctagagtaagatgtccaagaaaccctagttatctcagccccgaactcttaaaatgttcccagcccaastaccttatctgtgagtaaagaagcctttggccttagccactgacttaactgtaacctcatgggagactttagacagaaccacccagcccagatgctccaaaattcctgacctacagayagcattaaggataataaatgattggttttgttttaagyactttgtttttggatgatttcttatacaacaatacataagtaatacaagttacttcttggtaattcttggattaaggtgaataataaagtgtaatttttgcctcaaatgtagataaatctcctttctggaaatggatggaaacaaaaagacttagaaggtagtcatcattggcattgtggcatcttttactgttgagagtgacttttttttttaaaaaaaactgtagccctatggattagaaaaaacattggatttggtgtcagaaaacctgcagttaaagatttttaccggtcctgcctatgtgacatggagggaacaatcctgctgagtgttgtttttttcctgctgaaagtgaagatgtagaatttggtatctagttgttggtgacatatttttagaataacatctagagacgagtgcatcagaggaggatgatgaagggtctggaaatcatggcaaatgagaaatgggtttagaaagtgcaggagttttacctagaaaaagactattaatttgatatcttcattaagatatttgaacaactctcacatggaagaggaaatagattgatattatgcatcttttgagagcaaacagtaaacaatgtgttgtaattaatgtcttagtccaatactgctgctaataacaaaataccatacactgggtaatttataaacaacagayatttatttctcacaattctggaggctgggaagtccaagatcaaggcaccagcaggtttggtgtctrgtgtctggtgaaggcccagtctctgcttccaagacgacaccttgacaggatcaacaaactgtgtcctcacatggcggaagggtggaagggcaaaaaggaagtaactatttgccttcagcacttttataaggttgctaataccattcatgagggctctgttctcataacttaatcacctcctaaagtgattaggtcttaggctttgatttatgaattatggggggacgtacattcaaaccatagcaataagtatctagattttagcttatgtgaagattaattttttaataattagatttattagaaataatatttgagatcctgcaactgtagaaatgccaaggaaagaaatcttgtttattttttctgtgtttggtagagggaaactataatatactgactctctcgacatcttcaagaaggccaaaatctattcttttaaattactatttttttctgtttcccctaagcatcagtgtataaaatagcttttgtttttctttactacatgagtaatatgtttatggaagatgaattagaaaacacagataagcaaaaaaggaaatgaaaattaccaacagtcttaccaccatttaggaatcactgtaaatattttaatatatctttccagtttgtgtatgtttgtgtgtgggggagcacatttacacttatgcacacatataaataattggtgttatattctaaatactacagtatatgctttttttcatttaatacatctttccttgtgaataaattatttctatgacttctttgatatttatatttaaatgtgaagatgaaatttattttctgattaaaagtattatttgtgataggacatttacaaaatatmgagaacttcaaaaaggaaataaaattatctgttgtcccaatactcagagggccattaacattttattgtgtactatggtctctttttttctgtacataattttttaatgatgtataatgtgctaccaaacagtagatcttattccttctatctaactatatttycatactcatcaaccaactcctctttattccccatcaccactagccttcctagcctctagtaactactgttctattcactacttctcacatgtgagtgagaacatgtgatatttgtctttctgtgcctggcttatttcacttaacataatgtcctccagctctatccatgttgttgcaaataacagaattttattctttttttactgtaaataatattccattgtgtatacatactatctttttaaaattcatttatctgttgatgaaggtgatggatatactagttccccaaatttgatcattacacattatatgcttgtatcaaaacatcacatgtaccccatacatatggacaactattatgtatccaaaaatttaaaataaaaaagtatattagtcttattaatatactttgaactaacaatacattatgaatattcccacatttcattaaattttctgcaagactatgattttcagtagcttcaaaacatttcatcatatagataaaatcataatgccctcaaataattcctacaattggaataactaggttgcctatagttattcatcactgtaaacracagtatgttcaataggtatgtttgtttttaatggctgtgttgtattccactgtgtagttgtatcatcaattccttatgttttaatatctcagttctaaatgtttagcttaagcaatcctgtcattgttggagcaaatctttgctctttgcctgtttgattttttttgtttgtttgtttgtttgttttgagagacagagtctggcttgtttgcccaggctggagtgcagtggagcaatcatggcttactgtggcctggacctctgaagttcaagcaattttctcccctcagcctcccaagcagctgggascacaagtgtgcacccccacactcagctaattttttttattatttgtagggatggggtctygctatgttgcataggctggtctcaaactccttggctgaagtgatcctcctgcttgacttctcaaagtgctgggattacaggtgtgagtcactgtgcccagccttttgattatttttgacatatttgataattagttgtttcaagtttgtcagtccacatatttaattttgttgtatgctctggaagcctatggaagaagcatgaagtcctgaaatcctttaagagttaaaatttagttacagatatgacaattacatgcaaaatagtaatgaatattttattccagtatattattaaatgctaaattatatggttatgattaagtgctttgatgtgtagtttggagggtagcatgatagtgaggtccagtatagtcaggggtgcttcaaggatgaaatgcagtttgatctgaactttgaagagcgggttgggttcaaagttaaggaagatatagggcattccaggggaaagcaacaagacacacaaatgcccaaagatttgagtaattttgatatattcaataccatgagatggctacttaaatttaaagccatttgaatgccattggtgaaccatcagttttgaatagtaacttctgaaaaatctgaacaatattcgttttaatgttttttgtttttaatatttactttatctcttcaaatactggaaaacatcttaattaaaattctatttttgccgatatggaaaaactgctttttctttcctagaaactttttctaataactatttttgatactactgtgtactttttcaatcatctacayatattttacatattgtgtttaattgatttccagtgaaatgctctttagattatctgaatcaacatggcttttttcctttatttgggactaggatacttttaaatcatattttgaaaattttcttcactgttaggtttggtggggctgctgaagttaggggttgaaagaaaagaaatttatagtacatttcctttgaataaactaatgtttactaactcagtgcccacatgttcttcttttttgtgatgttcatgtgtttagtcgtgttaaacagtggttgttttcaaaagaaaaatcaaaagaagagaaataatctcctttatgttattttgaagaatcacaaccagctttaaaaattttttacacaattatattcacattgtaatattaaggcaaaacacatttatatcattgttctttagggagcagtatttcttaaagtgggatcaggacctgtgcatcggaatcagttgggttgttcatcagtattcaaattccttggccccctcattgtggaaggtggtatgggatgaaggaatctgcattttaacacacttgccagataattctacacattgaagcttgagaaccactactttagggaaatattgtctcaagtctcttcacagcagtgctgcmgtgacatgcattaagacttgrtagatattatcattggacattggtttagaccattctcacactgctataaagaaatacctgagactgggtaatttataaagaaaagaggtttaatagctcatggttctgcaggctgtacaggaagcatggctggggaggcctcaggaaatttacaatcatggcggaaagcaaaggggaagcaggcgcatcttatgtggctggagcaggaggaagagagagagtggggaggtctacacactttttaacaaccagatctcatgagaactcactcattatcataagcaaggggaaagtctgcctccatgatttaatcaccacycaccaagcctctcctccaacattgggaattacaattcaacttgagatttgggcagggacacaaatctaagccatatcagatattttgcctcaattgatgtgtcattggacctgttctgttcttaagaaattacaaaataatctgggctttttttcttaataaaatttactttaaagttacatagcctccttaaaaaaaccagagattctttgtcaagatttttttttaaagttggcattattgacttcatattagacagtaacctattataagtttattaatttacgtgccccttttactcagaygaattgcttacagacttccacttatgaaaggttaatatttgttaggtgttagaaagttaaaaagtgatggctggaaatggtaaattttgccccctcccattgttgttaagcatggtataacataacacgcgacttaagccgtttgtttttatttactgcctatttttacaatttggtgacatattgcaagtaattcttgtggcttttgtggggaaatcatgactctctagcctcttgctctctgctgcttggtagtgttgagccactttgcacagattatggggctaagaacagtgtgggtcatcactgcaataaggaacccatggttattgtctgtggtgcaggatggcagtgaccacattcccatgagtaaacaacaagtaacatagtccaacaagtmcataacaatgcgtaaataagattgtttggcattagtcctgatagaaaaaaaatggtactctttggagcctaaatgctctcaggacaatctaaagttgttactaggctggagagcctctcttagcatctttcaatttcagtttggcagtgatgggaaaatctcctttattatagtcaattgtgagtcatttgtaggtaaccacttccacatattactgttttgacttgttcttcaatcccttaggttgagtcagggtttttttttttttttttggccataatgtgacaataattggcatctgaaataaaagcaactgaagtatgattgatcaaatggtgattattaattcataaaagccttggtcagatgtctaatacggactttattaagaggtttaaatggctttgacaaatatatctctgcattttcattcacacaagtggagaatgaactggacattccaaggagccacatactagccatgactggcatctaaaagaaggggttcctctgcatcacttcacagaattcttgtaaacattaagtgagataaaacatctttcctggaggaaggaagggatctagaagaaaggtaaagaagagctctctttcctgccctgccccatttattttatccttttctgtttatttcagcataaatatattgagctgctctattctgggcattgtactagcaatgggtatgcagaaaaaattaagatttatctcaatgaaaagattcagcttaattgagatataatatatgtaccatataatttacccacttaatgtatacaattcaatggtttttaatatattcccaggtttcacaagatttatcttagttggagactcatgaacatttkttacttcataattcctcaggtccagaaggaagacaaatctctttagtcccattcccaaatctgttccttccttcaagaaatagtatctaccagttattaaacaccacctcagtattatgagcccagcactatgccgtggtgccttacaaatataatctcattatgtgctttcaataaccctgaaaatccattgtatcccaccttatatacaatgacaataatccraaatacctagcatttgttgagtacaattattatgtcatttaatatatgtagaaatttactgctgtagatatcattttccttttccccccttttcccattagttattaactgtgtaacttttgccccatgcttgtcctcaagttcttgattcttactgggcttccttgtgaaggaaagatatagaggagcaattaggattttcaggagtctgatggtgattaaaagactggctgatttactttatacacttttttatataaatatagggagagagaatacccttgtgcaaacagataaaaggtgaatgcaaggctgctgaagggctatggcaaaataatagctgtttccaaccctcagtttcagttaaaagaaatataagaatattttatttctatgaacttttaggtgtttgttttccacctacgatttgctttttccttttcagctgatccatctaaacctcttcacagttagctaacttctctatactatgaagtaattcctgcacaaatatttctataataagcctgtccttttttttaagaaaaatatttctcatctgaggataaacttgtccttttgtaaaataaaaaaaaaaagacgtttataaatcatgctgctataaagacacattaacacgtatgtttattgcggcactattcacaatagcaaagacttggaaccaacccaaatgtccatcaatgatagactggattaagaacaggtggcacatatacacaatgaaatactatgccgccataaaaaaggatgagttcatgtcctttgtagggacatggatgaagctggaaaccatcattctcagcaaactatcgcaaggacaaaaaaccaaacgccgcatgttatcactcgtaggtgggaacacttggacacaagaaggggaacatcacacaccagggcctgttgtggggtggggggagggatagcattaggagatatacccaatgtaaatgacgagttaatgggtgcagcacaccaacatgccacatgtatacatatgtgaaaaacctgcacgttgtgcacatgtaccctagaacttaaagtataataataataactaaaaaaagacatttttaaatgccacatgaaaaatgtgctgaagtatcagtggtaagggtaaggaatagaaagagacttctgtaactttggacagctgtgtagctagaaaaaccaaaacaaaacagttttctccaaaccccagcacacaaaaatattcatgttggctaactttctggcactgatttagataatttctgtattttctggtgaacaatgaacattggctactgaagctaacttttctacttgttctaaactaaaggrcagtgttttttatgatgtactcctttttatgttgtgggaagagtgttgatactaaaagtgtccaattaaaagaaaaactttaccaagcctaataattagtcattgaatctgaactaatttgaatgaaaggtgtaaatgagtaaggggttgaaatgcttgtttttgaagcacttaaactgctttatatttaaaaagctaaacagttttaatctgcaacttcacattagttcctttgacaattgcttctttaatgttttgtttaatcggtgttgttcaatcagaattgtattttttatttgtcctactaagttacttgtattttattttaattaatatattttatttgtcctactaagcatcatatactgtcctcagtttgggatttttttctccagtagcatgcaaagaaacgtatattctaatggttttattttattttatttttctaggaatcagagaataataagttatgttccctatattccttccgaaatacctctacctcaccacataagcctgacgaagggagtcgggaccgtgagataatgaccagtgttacttttggaaccccagagcgccgcaaagggagtcttgccgatgtggtggacacactgaaacagaagaagcttgaggaaatgactcggactgaacaagagggtatgtgtggacttcactgttgggctctgttttttttcttctaaagattccaggccttaaaaaaaaaaaaaaagtgggatttcaagggtcagagaagtgcataattgtcactagctaggaaaaagttattcagaggttactatggtgatggcagattttgatccattaggagtgttaaacagatagctccgtttttctaaaactttgtgcattttatttggttcttaagataacaaattaggattttaaactgaccataatcctactctggaaaaaggtaacaagagaattttcctaactgcaactttatttttcattttttctcccctatttccttttggtggatagtatttctttataaaaatgtcaactgtttaaaaagcaaaattaaaaatatttctcttcatttttataaatatattatttatctcctaacattgtagaatggagagttagagggcttcaaacattgttaaaactgaaagtatatgagtgacttctttgatacatgacatctcttgcaacatcccacatctaccttctctactctgtacaagagttcactcaggttcgtgtacatcctagaaaacaaatgaaagaagactctccaataatatttttaaacaaagtaaatcaagtctaagtgatggttatactatgttgcacttttggtttttatgtacagattttaggccttaaaatgtagagtaattaatagttctggatttattactagcattgcaagttaaattgagacttttgttttttactatagacaaattgggatttgatattagggaatttttcatgtaacttaattttattcctttgagggctcaaaaacttaaaagattccaattaattttcgtagaagtctttctaaaatatattgcatgcttccctgttttactaatcaggtaatatgacacaaaatgtatatattttttgatgacctagggtcataatacagtagactaggaacttcagtacccttcaaacaattatgtcaccctgggtaaattcttcaatctactcgagccacaaaatttaaaatttggttactgagtttgcaacttaaacattttgaggattaataataataatgaatatgtcttgaattaactgtaaactatatgaatattaactataaacttatacatttggcttattgtattatattatatataacatatataactgatatattataaatgtcaattattttactgtgctataataatgcccctagtgatcattgagattattagcactttgattttatggttatttttcaattatgaaacttaagagtttttgtgtctgcttgatatatatatctttttgtatatatgtatttttttggtgtgtgtgttggtttctccttcaatatcaggttgcaggctattatttcttgcttagttgcaaataatttctaattttctcctatttacctatagattataaaattagataatcaggaaattctggactgtatttgaaatatgaacaagtatgttctggaggtgttgctgagagattctgggaaatacatatgatctttagtgcatgaactacatgctgacacttttggcttctgaggctttgttgtccacattyttggctatgttctgaataatggggattgccagataattatctactgaataagtaagatcactagattacttttaattgtgatccaccaaaagatggtttcagttctataagtaagtggttttcaaaatactttggaggagtctttaatgtaaaaataaaggcattgattgatgatgatttttttcctgaactactagggaattttaaatcattttttccttgcaagtaatggttaattttctcttcrtcctctttgttaccatgtgttacagttgattttgtataagagagacacttacagaatgagacagtagtcctttaagagtcatttattactgtatttctactagtaatgaatgttttcatactctacagatttttttttgcaatatgtatgttttagacatcagaaattcaggcatctttagtatatattaatgtatataatataaatatattaaatgcagatattaaatgaccaaaaacatgctcatcaaatttacctatctcacaaatctggaacagtgaatataacggattaaagaaayaaaacttaaaatgttttgacaaactgaaactatgaacttaaaaataacctaccaagataaaatttaatagatcttattatcaagttcagaagttgtgacccaaatcccagctgcacaagtaattactgaagaaaattcaaataacagccagatgaatgattaaaaaaaaaaaacctatgagttttaagtgacagaaaatgcaatggggtcagcatagtgaatattgccaaaaaaattgccagtgctatttcagtcagcatcactagaagtacagtatgatgcattcaagagttggtagtcccactaaactcactgctcaatagaatgtttgtgaagtattgtgttgagttcagaattaccacactttaagaggaactcaaaggcattgggatattctcagagaacaattggtataatcgcagagatgaaattatataagaagaagaatggttgaaggaattagtaatactaaccccagagaaaagcaaatcaaggatgacatgatggtgtctttaaagattcaagtcacatggaggagggattgggtttatactgtctagcttcctggggatagaatacagatcagtgacaagaagttatgaggaacctgattatggctgataagaccaactagctaacagctgtagctgtctatatggaatattctcccttggaagatagtaactgatctatccttagagatatgcagcaatctctattgtcattttaatagaggtgttgtagaggacagaagtttgatcttttttccaatgccaagactatgaatttttatgaacattcttataaaatattctacagtttatggtatatctttttttttacagcacttttcaaggactacatagtattgtgattatttttctacatattcttcttctgtgaaatgcattttattaaaactcaaggattcttaatttttctttctgtgaatccctttgatagtctagtgaagcctacagatctttttttaaaaattattttaaatgcataaggtaaaatacacagattacagagaaaatgaatcatattaaaacagtaaataggccaggcacggtggctcactttgggaggctgaggcgggcagctcacgaggtcaggagatcaagaccatcctggccaacatggtgaaacctcatctctactaaaaatacaaaaattagccaggcatggtggcaagtacctatagtcccagctacttgggaggctgaggcagaagaattgcttgaacccgggaggcagaggctgcagtgagctgagatcatgccactgcacttcagcctgggtgacagagcgagactctgtctcaaaamaaacaaacaaacaaacaaccagtaaataatttaaaacatttgtgatatggtagaatatgctattccactaatgcattaagaaaacaagatcttatagagggcctaacagtataataattttgaaatagtgataagcgtaaaagatattttgagatatctccaagtataatgtaatataaaatatcaattgtgatactattggtgacaatgtcataggaaccacaaatacagtatggtttgttacttgcatccataatttaaggaaatgtaaattttcaatacagtctagtgaaaaataatttttccacaaaagtttacagaccccttgaattctatctatgtctgctgragtctgtggaccaccagttaagaatccctatgctagatkatatggtacacccataatgaataaaacaatggtctctaacttttaataattcatattccagtaagagatataaggcatataaaaatgaactctaattcagtttctagtatataataaattccatagagctatatagataaaatattatgggaatttactagatagaaaaattacttctgccttggaagccattggaaggttctgtagggaaatgggtcttagttggtcttggagaatgaaaggatttatatagacagaaattgagaggagaaacatttcaggcagaaagaataggcagaggactttaaaacggccaatagttcaggttctaaattaaaaaaagaagatgcatatgggatataagactgaaaaagtaggttgtgttcagatcatggaggccctttgactcttgcctaaggagtttgaactttatattgaaggcaatggaggaaccactgactgttttttagcacaataagttggtggattagagctttctttcaggaaagttaatctggctgcactgtttaggatgaatgggagcagggagagacattaaggaaattgtttcaagctagagataatgagggtctgctgaacgaaggcagcagaaatgaggaaggaagggggatgcatatggaaaagatattaagagatagaattgttaagagttaatgtttaagtgtagagaccaagacagaagaatggttcaaagagtgctcagaatttttaaactctgggyaaataggaacgtggtaatacaattaaaaaaaaaaaaaaggaggaacatgttttggacatgggagcaatgagaatttttttattctgagtttggtatcttgagtttgaatcctaattttgattatctacttggagcatagtatagaatagcataatgggagaacagaaataattatagaaagggtcattaaaaagtttaggatagatttctgcttctcaaataattatattctaggtctaaggagrtataacagctccaccaatatttgcctgacattgatcctttaaagttccaggtccatctcctcatttgggatgtattatctcaytggacacctaaaagtcttcaaatgcattacccacctctccctcayatctacttcatggtttgagrgccatatttcatgattagctgagagacaagcctgtgtgattgacatgataaatgattacctttcttgcattattcttgttctggagaatatttttactctttatcagactaaatacctctccctcatttgccctcatctacaagaactgatctgtaaaaagttcattatggtccttttaaaaactatatttgcatgatgaaacaaaaactctccaggcagatgctttgatcaaccaaattgtccagtgtttaatctgctattccttcaagaaatgccctctcctgagcagtgatttgaccagattgtaaaacattgttgaacaagggtgctacatctgaagtgccccctctgaaactgagacttatgggaagataggcaaagtttctgtcttttgtaaatttaactttgatttagtattatagattggtaaattggtatgtaggtaggtagacagatccatagatggattgaatgattgaatgtcagaaaccaccttttaaaacattggtagatagagtgtacaggaaagctttgattaatagattcaggttaagatgcttccaaggctaaaattcttcagctataataaaatgatgaattttagttatccttgtatcacccgtcttgttgccaatatagctgggctctaacataagcgacagaaaatgaatactttaaaaaggacttctatatctaaatacatatatttaatcagagagtcctttggcttctgaaaataagttgtctaatgagaatttcacttgagcagctgtgactgaggaggtcaacaggcactgcctaggagaatatggcccagctggttaaatctggttgttgtcgtgatttaaatggtcaagtgctgcttgtaatccaggaccgtctgtttgtaaagggaagagtgagtgcttcagcataatgtacagctgttttaatctctctttaataatagtgcttcagccactatcatgtcttgtgtatcatactactaagtatatgatcctaggccgagggccctggtttgagtcaggttctggagtcatgtgagattgcaggaaaagggatacaatgataaaactctcaactgtctgacaaaataaaactaaattcctgactctatggctctttttaaaaacttattctttaggtaataattattgtgattaggagagagtgacaaagcttgtagttaggtagaaatattagaataaatgaactctctttgttagagccataaatgtaatggaaagtatgcaggctttgatacaattccatargacatacattggtcagaaattagagtatttgcccagtggaattgtgtgctttctgctatcatggtaataaaagtatgtggattcattttactgtgcatgtaagaagggacagcarcatttgagctttgaattcctggtgggacaggctttccaatggattatgcagctgtttcccagcacaagaatgagcatgtgtttatgtgtatatttgatggattattatcattgttcacatctctaaacaatcatttgtatttctacatatattttcactgaratatatttactttgcttataagttgtgttttgctcctctgatagactttgctctactaaaagagatatatggtatagtttaaacaatgaggaaattcatttttaaaagtcatgtctttgagctagatctgagtttgaatctaagttttaatatttagagagacagtatagcctactgagtgtagactctggagctaggttgcctgtgtttgaatttcacttcagcatttcctagatggatgacatagagcatgttacttgatctctctgcttcagtttctcaaccaaaaaatgagtatctttacagtgttataaggatcaaggttttcatgaagatgaataattagttaaggcaactaaagcatttagaacattgccagctcaaagtaggtgctcaataaatgtagccagcattatttcctggttgtgtgactttggacaaattaatctctttgtgcttcagttccctcatctgtaaatctgtatgaatgatacctgccttgcagggttattgtgaggatttgacatattaatatatacaatatttagcttctgtaattataactattactagtattgctattataactactattgctgttattatttgaagaaacttttaaaaaagaaaaatattctaggaatctcattctgtaccacagacagaatcataggaaatgtcccatggtgttaagggatttagcatttggcagcaatgatgttcttgtgttctggaagagcaattcagtttaactctcttttcaggctatttggaaaagctgatactaaagtttccccactgaaagccaatcatcccttctgaaaaatatgtggaatgtgatggtgtcagtgagagaggttggtaaagccttggatgaggtttttagatagtagccagttaagagcaatgtgtttctgttaaagcaaaaaatctattaaaagcccatgttttttttttaattaacattcacaccctgtgagaacatcacaataatttttaaggcaaaatttgtggatattaggtttttaccactattctgattgaaagttatattggtgaagcacttataatatcccagatttaagccttgttttatgtttctcattaaaaggaaaatttggaaaggtttcgggtttttgcataagaaacactttaagtattcattaaaacacgcaaaattgttatttcaaataaattggaaatttcaagtcatttaaatgctgaagtttcccaggaccactcatacttttggtgcagaagcaattgggtattcagaacaatgctgatacaacttcatttaaattcattttttcttctctttaaaatctttcctcccaataatatttgtgtccttgctcctgttttaaaaaatttgtatcatattcatagtaaatacttacctagtaccagatagtttaaataaacaagtattttctgaaagttttgtacaatgatatttagggattatattgaggagctagaactattggtttttgaattatgaaaagaattatgtatagtctattttcgtgttaagtatatttgcattctatttttttttgaaactggtcttcctctcatattaccttaaaaaacttaaaatgagccagaattctgtgaactccagaccttctgggcaactcttcgttatttctatttgctatatgttttgcaacctccatttacagtttgggtaatatattatttggttgaatctttttcttaacttcaatttgtgtgtctctgccttgaaaatatgcctcagatttcttgctcatttctatctcctcagatttaaaaattcatttgaagattctttctctaagaatctggggaacagatgcaggcaattgtttctgatttttcctgttattgaactgtggagctagaaggtgctctcctggcattttgttgtttagaaagaggatgcagctttctgatggttttatgaaataagttatagtctcatatgattttgagcttgtggaggttgagtggatcattagcattttgcatttttctattgaaaattcattagactgacttctccagaatttattctgggagtctcaggaaataataggggacagttttgggatctgtattctttctccttgtacaatatatatgcaatatcaaaagaaaaaatgaacagaaaaggaagtggtaaatgtaaacatttatttattatgtaatatttgatatgtatattataaaccataaaggtaaaacaaacacttgtgaactcagcatccaactaaataaaaatttctaatactattgaatctacttatgttttcttcacctgtccaatctttgtttttttatctacatttttgccagaactttgttaatcattatctgccttttttgttttaaaatagtttccaatcggtcgctaaataatgattgtttagccttgttttcaaacttcataaaaatgatgtcatactgtaacctcttgtgacttgctttytattcttatattctatcatcagttttgctgtgtgaactttcattcattttctcttttgtgtaatcttccatatactattccatgctatgctatatagcagtatattctcctgtttattgtttctggacacttggactttttccagttttctgctggtgcaaacaataacatatgaagattcttgcacctgtcttctgatgcacatgtgaacaagtttcttctctagggcatttccccaggagtggaattgatattgacacatttttgtgttctttttccactctcttggaaaacattacacaaagaagttgctgctgcaatatgtgtgtgtgtgtgcacgcacgtgcatgcatgcgcctgtgttagaattcctgaaagctttaactgtctataccttttggttccaccttcctcaaaatgtctagtacaggcttttcttcatcactgagcttttcagaagctcagcaagagcctttgatggacccttcactgcaattttcctttttccttttgttgtatctgaatacaacaggctgaatgtctttagccctcctttcaactaggagcacaagaatatcgtcgttcttctactggactgtgattactaggtttgttaggaaacacttttttcccttttgatcctctttattgatgtttccagcacagggtgtggttttagaattagagtagttcctcatctctaattgcatcaggtttacaataatttttacttaaatacttacttcaaatgcaaaattacaaacctattaattattgccactgttctagccaaccatttatattgaaatagacatttttctggccaaacagtcgacattagctggaaaccttcacctctctctcagaatgtttaacttgagaatccttacagatattggcttgggattgatgtgcattcttatcctaactctttttaacttattaggttgtgtctaataattaattaattgatctaagcactagtttcttaatttataaaatgaggatgttggtctagataagcattaaaggacaatttgtaaaattctatgccattttgattttcttttacagtttgtatccaaattttagagtttactatcattacttttctcttttaaactattttcagttcaaactgaataaatctcatgattcattttctttcattatgcttgaaactgtccttttctatttccaatttcttctttctgatgttagaatttttacaaagatagagataaaagcttctatccaattttgatatctgaaactgtcattgtccagtgaagcacttacggacaaagccatggcttcaaggctgtggcttaaagctgaatatgtgtggtgctcagacctatcgtagctttcttagttgatgtcttgagtttaagtrtaactgagtagctgtacctagaactgagagaacagacaagtactctcacaatgaagtaatagaatatatgccatccgctagcattgggagtgcagaaattagaagactgtggattcccctaattgctctcaaataatgaattgaaaatgagtaaatacaaataggtggctagaaaaaaattgatgaaggtataatgaagaacaactgtgaaaatatgacaaaatattgaattatttgcaacagcaccattacagcggcaacaacagcagcagaattattatgctaatatatatactttttgaatgacagtaacctatagtcaaagggcagtttttaaagagtggctaacaaactgtgtgcactgggattccatttcactccagaatgcctttactagcttaactggagctttctagcttatcccccagaaatatctcttatcttgaacattttgcttatgttatggacaggggagagatggaaaatttaagaattaaagcataagccacatgttttggaactatttttctttgatttcargtagaagaggtagacaggaaactgtcttatgtgcccaatgtacatagtcctaaaaattattccttggttttaayttaactcttaagccttgaccctgattaatagcagaaagtctggtctcacttctaggtaaatcaggaacttcagtatttaactttagtcatttagaattatgccccttttgcttcttattggtgttatctaatatccagagagtttaggcattttattggcattggagcattggtatctggctaatgatatcaatttctattatgcctagaataacattcattgcttaaaatcctaacatattactctggctttcaagccccattttatattactttactcttctctgccatggacgactcccctcctccttaaacatgtcttaggacctttgcacttgygcaaacatataacttggacattccttagttatattagacacactgcacataattagaatttggttcctggagttctgttgtaatctttctctagtgagcattgtgattaagaaattcgaggatgtaggctgagcgtagtggctcatgcctgtaagcccagcactttgggaggctgaggcgggtggatcacgcggtcaggagatcgagaccatcctgaccaacatggtgaaaccccgtctctactaaatatacaaaaattagccgggcatggtggcatgtacctgtagtytcagctactcaggaggctgaggcaggagaattgcttgaactggggaggtggaggctgcagtgaaccaagatcgtgccactgcactctagcctgggtgacagagcgagaatctgtctcaggaaaaaaaaaaaaagaaaaaaaaaaaaaaagaaatttgaggatgtaacaatctcaggacaagatttttatctgttgagtcagcacagtgctgaagttgattagttatttagtccaacatacttcaagcttagtcattatccctcctatccagaataactttgtattctctccgtttattgaaattttccatttatccattttccrgatcatacctaatcttctactgactggcacttgtgaatgtctcctcctctaaaattattaatactcaaacctgtacaccactgcatttatcaataaattataatcctaattatgctgtttgctcttttttaaattgaaatttttgttgagacaattgtagatttacatgaagctataggaaataatacagagagattctatgtaccttttgcccggtttcccccagcggtaatattttagaaaactgttgtataatagcacaaccaggttattgacattgaaacaattcactgatgttcctcttgtctctccatttgtactacattattgtactcagttgtgtgtgggggtgtgtattaagttctatatatttttgtcacctatttaggttcatgtatccactacaacagtcaaatgctgaacagttttgatatcataagaattccttgtgttgctcttttgtaaccacacctaccctgcttcaatgccagcatccctcaccttctataccaaacccctggcaactactaatatgttctttacttctaacattttgccatcttaaagatgttatataaatggaattatatagtatgtagctttttagaatttacttaaaaaaaaaaactcagcttacttccctggagattcatccaatccaattaatgggtgtcaatacaaacaaaattttaagaagttcatacttaaaaatttgctaagtgtattccatggtatgcatcatatgtataaatcacatatgtttaactatttacttgttgaagaacatctgtgcagattccagtttttgactattacaaataaacttgctatgaacatttgtgtacagggttttgtaacataaattttcatttatttggaattagtacccaagagtacaattgctggctatattgtacgttggattttataagaaactgccacactgtatttcagagtagctgtaccattttacattgccacccacaatgtatgagtgatccagcatctctgcatcttggtcaacatttggttttgtcacttttgttttaactgttcttataggtgtgtactgatatcttattgtagggttaattagcatttatgctatggctaatgatgttgaacattatttcacacgtttgtttgccatatatgtatccttgtaggtaaaatgtcttctcatgttttcggtctattttctaattggattgttttatttttgctgttgtgaaagttttttattattctaaatactagtcctatgatagatacatggtttggaaatattttctcccggtctttagcttgtctgttatcctctttacatgggctttcacagatgaaagtttataattttgatgaggtccaactgaacaattttttactgtatggatcaagtatgggcatcaagtctaagaatactttgcctaaccctagattctaaatattttctccttttttttttctgaaagatgtgtagttttatactttacatatatgtatataatccattttgagttaatttttgtataaggtgtgaggtttaagtcaaggctcatttcttttggcctatggatgtttaatttgctgcggcatcatctgttgaaaagactaaccttcctccattgaattgctttgcaaatcacgtgattatctatatagaaaattccaaggaatctaagtacaaaataaaacagaacaaaacaaaaaaccagcctcttagaactaatgagtcaacaaggtcacaggatataagacgaacacttaaaaatcattcacatttctatacaatagcaatgaacctatgtctttgtccattcaggctactgtaacaaaatactataaactgagtaatttataaataacagaaatttattgctttctgtgtggcattagcttctctgatattttctggatactgggaagtctaagatcaaggcaccaacagatttggtgtctggtaagggctctttgcttcatagatagtgccttgttgctgcattctcccatagtggaagccacaaactccctcagacctcttttataaggacatcaatcctattcatgaaggtggagccctcatgatctaatcagttctcaaaggccaccatctcttaatactaccacattgggtactgggtttcaacatacaaattttgggggagacacaaaattcagaacacagcaacatatgaaaactgaaattaaaaactcaaaacttggccaggcacagtgtctcacacctgtaatcccagcactttggaagaccgaagagggtggatcatctgagatcaggagtttgagaccagcttggccaacatggtgaaatcccatctctactaaaaatacaaaaattaacagggcatggtggcgtgtgcttgtaatcccagctactcaagaggctgaggcaggagaatgtttgaacctgagaggtggatgttgcagtgagccgagatcgcaccactttactccaacctgggtaacagagcaagaaytccgtctcaaaaacaaacaaacaaaaaacaaacaaagaaaccccccacaaaactatttacattttctccaaataaaatgatatgcttwggtatgcacttaacaacatgtgcaggatctatatgctgaaattacaaaatgctgattacaaaaatgaaaaaagacctaaaaatatgacaagacatattgtattcatgtactaggagactcaacatggtaaaaatgacagttttcccccaaatagtctgtatgttttatgcagttcctttcaaaatcccagcaagactttcatatacctagacaaacttactctaaaatttgtatagaaaggatcatattctagaatagctaagaaaatcttgagaaagaagaataaagtgttaggaattattctacccaatactgtattaaggcatactatacagctgtagtaatcaaggcaatgtgatattggaagaaaaatagtcacatatatcaatggaatatactagagaatccacagataaaaccatagaaatatgctcaactgattttgacatagatgaaaagtatttgttattttacatttattgatcttgcctcacaagatgattttaattttcttgaggacacataccatatctttagtctatcttcacaatgcctgttatggatcttagcatataatatacattaacctaaaatactgttgatttattataaaagttttcagagagataaataatattatgattaaaaggagatgaatagctttaatttttagagaatgcctcttcatctaaacaaaacatacatatatacacacataacaacatatgtatacatayttaaatacacacatacatatgcttattaattccataatcatttattaagctttttcatgcagtattgtagtgggcctgggttggagagaagtaaaagtggagaaaagggtagaagaagatgaacagagataaatattgttttttagtagctcataatttagtaggaaacacatgtaaataaggtaattatcataagtacaatagtagaagaagmtataaaatgctgtgttggctgggtactgtggctggccgggtgyggtggctcctgcctgtaatcccagcactttgggagaccgaggcaggtggatcacttgagttcaggagtatgagatcagcctggccaaaatggcaggaccctgtctctactaaatatagaaaaattagttgggtgtggtggcgcacgcctgtaatcccagctacacaggcggctgtggcaggagaatcacgtgaacccagcaagcgaaggttgcagtgacctgagatcgtgcactgcactccagcctgggtgacagagcgagactgcctctcaaaaaaaaaaaaaaaaaaaaaagaaaaaaagaaaaaaaaatgctgtagaagtatagaagaggaaaccataatttttttctagatctaaatagggatttattgacattcgagctagattttgataagctcatcatagtgaacaagagatataatggaawcccaggtagagagaacagcatgtacaaagtttcatggtatgaataaacctgtgagtttaatgaatgtgaagaagtttggtgtgactaggacaggagacacaactgaaacaatatgttgaagccattattacagaaattgaattttatcctttgggtagtggggagcagttgagaacttttaagtaggaggatgatcgacataattgaacacttttttaagaaaagtaactttggtggcattttgactatcagttggaaagaggcaagggcaaatacaggggaatctggtagcaggctattttaatggtccaggcaggtactaatcagactctaaactaaggcaatggcaggggaagaagagagaaggaatcagctgtttgaggtatagttgaggttgctaattaggagtggagtgtgaggttagggagatatctagctgagagatttaatggtggggctattagaatggtgaatatagagagttgagaaggtttggggaaaaggtttgcatttagatataccaagtttgagtattccatgaaggtggaatacatctagcaggcagaagtacgattgactgacttggagattagaagagatattggctccttttcttgtcgttttatggattgaatttttttttcttagatactcacttcaaattatcattgttgctttcaggttgcaacaatgaacattgttgcatcaaacttggtccatatgtggaaactccataatctatcattctattcatataaaataagggaagtgactatacctttagccccaacatgagtcatgtgtagcttatctgttcagatgaactcaattaattttgtagcccagtgtttctcaaactgtcagtagcattggcatcacctgggagcttgtttgaagtgcaaattcttgggcttcatccttgacctactaaatcaaaaactctgggatggggcccatgaacctgtgttttagcaatctctccacgtatttcagatgcacaccaacaattgagaactatggtatagtagatatactctactatattgttctgtaatatatagtccaagccatgtaatatggtagcattaaatcgacttctgactgggtaacatatttttagccatcttcgtgatcggttaactgtctaagaagtgttcaaataatggataaatttgtttgattaagaagtagggtgaaagtactagctacaggctgtatatgtcaaggagtaatagatattaccttctcattttattattctttctttaagtcttatttcatataagtttgtttctcacattgctagaaaatcaaattgatgtgatttcatgaataagaattaaattcaggactgccttagtggcttagtgactagtttagagtgatagtgttgggggccattgttagggaagaaaagttgatgagggaaaaaagaaaaggtattgtgtggtttcagatgtaataatctggattcagatattgtttctgtaccttgatcaaaggtatagcacacaggtcacagagtgatccswtatcttatcttatggtgcttaataaatattattggatgatgagccaaaataatgtgaaaaacaaaacccacaggctttaacatttaatggccaaagaaaactctgtattcttcttagacatgtagatctagaagtgttgaggtggcctaggtagaagtgaatttcctagttgttaaggtgaacagccgcaggtttctctggtgatgaacttcagttttcgttagccccacttgctctgccattcctgctgttttgcaacagggcttaaaagtgctttaagtgcttgtgaccgtggtaatgaatgaaaatgtctttccagcactgagaggattgcattagactgaatagtcacctcacttgtaaaagcactattagagtggggcagctgtaagtaaggataacgatttgtgtccactgcttatttactgaaaattgtcaatgtattatttattgagagctctccagacagtgcttgtcagaataaaaatgtcagctctgagcaaaatgttataatacataataaaaatgctaggtatgcattttaggaagacaactaattagacctgctttttcttaaggaagggacagtaaaaatgtctaatattgtggactttctycatttgtataagtccttttttttaatccctgctcagctcagtatttggtttagaaacttatcatgcctgagaaataatttgaacaactttgtattgtggccattagacaccccaagtactggggaagcttgctgaaggaggaagggcctcgcttgccatcccacagtgagcagccgccctcacctccatgttttgtctgaaattagaagatgtcacttcctccctgagcagtgctcgtggaaaactgcctccagtgtaaacaacataaaattattaagcttattcctcagccgtgctaattaaccccaaacaaatttcacattaaggaaacagaattcaatcaatgtaaatgttattgctgtgtattastgtaagcaataatatagtggctaaaataattaattattttggatttttttaaaagaaagtattcctttttatggtgttgcaaaatgttttgtggatatctcccccctttctttggcctttcctggtgtagaatataaaagacccatgtggtaaagcatgggtaatacacagttgttttttacacctggattgtaaaaagggaaaaacatattttgcagagcttcaggtttacttagtctaatatattagcaatacatacgcagattttgtctcctcttacctatcgtagttgactattcattttagcaatttcctgttctctctccttccagtcttaaatgaaaaggcgtgtggtgattttaaaaaaaagaatgttaaatattaaccagttcttagggaaaacatgaaatgccactttactgtatttcagattttgggaagcaattcccaataaagattcccacccctcccccgttttttataaaaaaaatctgggctcatataaggagtcaaattagcctcatcaagctaattttctaacatttttgaaaacaaccagctttctaaataattgcttggtcgtgcctgtgatcacttgggataaaatacattgttatcatcattttcttaatcctcaaagatctttaaagacacgaagtgcagaagctagagaatatgtaactttattttcgtgcagtagaatgcatatttgattaatatggaactgtttatcagtgataacatattctatggtatatggaacataaatcaaatactatttgtattaagattattctgaaaaatgatacattctttaaccaatatataccagctagtgttaattaactttgaaatttaaagtaatttaactaaataagtaacacaataaaagaaaatattgcttttcagaggtttaatacccaccatttctttgtaattttaccatcttcttccagcaaacgcaattcttgtatctcttcatcctctattagttcagtatcttatttcatgactactcttaattccttattcttctatattaaaactctatcttcatcttggtaggagtatttaatcttttaatcatatcttaaacatctaatgagcaggctgctactaaatatttacagtgatgccaaaacgaataataagaacataagtgttccaaggaatagctggagtatgttactaaaaaaaaataagtaaaactaattctttatataagagttaagaagaagttaaaatctcttcgaaggactgttttagaataacatctgaatggaccatttattcaattatatcttttggcttcaaatgatttgtttcagataatttccttagtttctatgaccagatagttgctttcttttttatttctttgggtacttatttttacttttccaaacaggaaacaactttgtattttatttatttgcatcacataggtagctgataatatgttctagattatgagaggctatattcagaatctaaaaaaaacacataaatttagacaagtttgtattgaaaaattccatacattttagacatttatgtctttaagtatattttaagccaaaggtttaaataatatgcattctatagcaaagaaaataggatggttaaatatgataactagaacttggctagccctctggttgtcaggacacttaaacaatttttaactgtataatttctatgactaatattcctggattttaaagttacactataatgccaaacgaataaatggaataaaattttaaaatgagggtcccagtcagaagaacgtatattagtatgttttaaaataagacgcaaagggtttgcatccagtattttattccctttaagactataattgacaaactgcagtaatcatgcttttatgtgtttttctgcctctactgaattcatttaaagaaaaagaaagtaaaaaagtgaaaaagagactccagaattttgaaacccagtggtcctaaagtgatgggaaaatagccaaggtgtcacagctaatttctgaccctgttttatgagttctgctgttccttattccccctgtcagcctgggaatccctgaggctgtgcaaactggctgaacatcactcaatccaagttttatatccccttttaataatgttgagtctattctgtccaactttgattcagacaacctgcttgtcttgaaaaagtgatatatttaatcagtgactctgtctccagcatagctcccactgcgtgtgactagagccagagagtagtgcagtggtctgtcatttctgtttgaatgggtaatgtggagcccatcagctgaaaagacaggagctggaactgcttgttaggacacatgatcaaaagccactctctgctttctgccaatcaaacctcatgtcgccttgtggggcagacattaaatagattttttttctgccttacaatatgggcactttgccagtttgacatgtgaactgttacaaaagatagcagagttttgaccacttgctgactgcttaaaaatattaccgaacacttgtcaaaatgaaatattcataatactatattatgataaattcagtgaagtattatttggtgcatttatgttrtaatttatggaattttttttgtggggcagaagaaacagtagacacttgcttcttgggtgaaagtaaggaagacaaaactgtaaatcagtccaattacaaagctatcacaactgtgtgacaaatagttttgaataagatgattattactttatgaaagtaacattagttaattaaatgttattttgcattctctctcatctgctttaaaaattatttacttcttgtaagtcattgtaggagagtggcttttgtattatatttaatacaaaaatatgtaaaacttttattttgaaatataattcaggatcttattccttcttsttattgagaagatggamacattttaaattcgaagacagtctttaatttgtggctgtcctgatgggtgtttttactctgccttttctttttcttatcctctgaagattccactattatatttctgcttcatctttgtgcccataacattacccagtaatgatagtggaatagacctaacttctaaggtttttaagagaagaatgagtacctaagtacttttgacttaaaaggtcattgaaatgggcatttcctaccattttcaaaccacccagataactgttctaaagctgttaaatcttagttggtgttttgatatctccaaacttgccacttgccgtttcttctctaatgatcattttaaaaggagttaaacattttcaccaaaacataccatggcaatctagtggaactcatttaaacagtgagctacacataaacagctgctccttcaataagccattctttataatacccttattaccttctagtgtctcaaattctgattagtcaacagtgctgattgctgtacagcattccgttgcccatcttccttctgctcagctgctcatgtcttagttgttatttgattacaacacaacttgtgcattgtttcaccaagttgctcttcacattgtgtcttaaaaactgaattatctagggaaactggggtgttgtgagagtgactttctttatacacatttaaaatrtctgagtaaagcatggtattaaaaaagacataactatggaattcttaggttggaaagaataattgtggcttaaaactcagtacttataattgaattatgaaacagacattaaggatgtggaagtgttttaaaaagcatatactattttacaaatttaaagagttataaaaatgttatattatggtgattaaatttcaatcagatataaagttctggaagaggtaattatgtatgtataactccataggaagggcctaaaggaccttcatctttgccccaggactagataattttagtccaattactgtgcagcaccagtgatgcctcactaaataggatagcctgttggtagtttaagttgtgatgaaataagtaagggtgggaaaaatctctataatgaagtttgaatttcagctattcctttgttgtgaccccctggaatttactcttagtgagtaggaaatgctgacacactagaaatgcaaccccagtaaaggccctaaatctgtcattgtgctctggagtctgctctgaaaatagcaaagctcttttggtaaattaaaatcggtgtgaatgggaacagatgttgacatgttttactttatcttcagggatgccagttaaagaggagggggtcagcaaggttagatggtaggaaatagagtaagtgtgcaaacttgttttgtgaagggagttctgttttgggacattagtcaatagaattgtatttctcttttgtagtccaggtaagaattatacctccattactatatctacaggaaagatgagggggggtggtatttatttccggatggctatctgcttttgatgttctcttgtgattgtgtcttttcttcatcaaactgctataaactgtctcagattgctattaggttttactttgcaacatcattttggcatagcttcctaaagtatttgttgaaccctagtgctgtagtagagtctttgtactggtatttgtcaaaaataatgaaaatggtttatgctctaaaaatgcacaatttatcaaataccttgtatagttaatttaaataagtctcgtagaactttcagtcttgatttgaaaaaatagcwwaggatgaatttatttataagaaccttaatagtttctctcaattccttttacattttagattaccttataattttctaaatctacatgaacaataatgatcaattttgtcagtattattcacaccttttattaatttaacatagatgaataaatgtgaatgttgtgaagagttgattgggaatagattttaaatctgacagttagattacagggtacctaagaaaaaatggctctttcactaggtacctagtaatttaattcttgtttgaaattattataatttattacagtgtgtgggtcctaatgaatgtctactattaaatgaaaaggagaaattgaaattaagattatgaaattcttttaactcatatctttaaatccccttaaacaattcagaagacattaataagctatggaggttatgttccatattctgtaatgacaaataaaaacaatttttttcagtgtttaaagaatctagaaaatgttgagtgtcattaaacttcaaagcatgcaatcttggaattttataaaatggttggtagtagccattataacagcattaaaactggcaacttcatttaaatatttatttggactatacatagatttttctagcatttgagttttccagaaatagtgactatttccttagtgttaaacacttaatgtaggatgatttgagatttcattgagctatgtaccacaccagattaacattttaaaaattccaaataccaaggagagttttaaaatgtcagtaaaaatttagaaataaaataacgatgtccaattgcccaaaggcattgaaagttgctacttactcctagatctaagtaaaagctggcatgtacacaaagtgaagctcaagacttttaaaaataataattcctgatattaatgtaataaacatttactgtttattacattaatgatgatatatggcaatttttctagcctgatgaattatctgaaatgtcatttgaagggtccattgagtatcttacctggtaagaagcccctcttgcataaatatggccatgcttatttgaaaatcatttaagaaagaaaataagcgtgattggccccttgaatttcaaaccattagcatgcttacctaaaacttctaaaattttgtttcctaatttctggagctttttttttaattgatgctgccataatgcatatataagccagtaattagtttatgtgtagaaagagaaaaagaaaataagcaaggtggtgagaagtttacatttgactgtagagaataatcctgctctgggtttttgacagcctcagaacagtgcaagcagaggagatgtagggcctggtcgtctctcactgcggtgacccccaagtactaatcttggatatgagaaataaaatgtgatgtcttcagagagtggctatttaggtagatttttgttggttggttgtaatttcacataaatttcccttgagactgtggaactgtgcttakacctgtaaaagtcacatctctattcttttcttttgtaatacaattctctaactccctctccccactcccacccctacttaaggatgtgttgccaaaagaatgtagtgagagtgctagctgtttttagatgggaaggtgatttgttgcctctgataatctgcttgttgagctcaagttagctctggcatctgaaggaaataaatgtcagaaacaagtagggcagtgctctcttagaaatgattactgatctctttttaaaatgtttacagtagttgtttaataaggaaacaattggacagaatttatgctgcctaagtttctataaataacaaagccttttctcatctatctgtaatgtccacgtggttgctgtttatcactgtagctagttccaacagttaaattccggtgtctctcatctactattacaaaaggctaaagtgggccaactacatcatggggatagggcaggaagataaaactttctcatattattcagtgtgagaacatgatggctgtactataaaaaactgctttaaaatatttttgctaattgtgattcagtaattttaaaatgttaactttggaaaaacattgacaatttacaaaagcatatctactgttagatatttaattagatttttttctcctttgtgcctatttaaactctaaatgaaagatggaaatatgtttgctctaaatatttgatgtgattgagatgagattaagcggtttaaatgatttaaaaattatatttactttagtgcaatctgttagattcaatgctaatctgtcttttggtttgctttgtggtacaggaaactaagcaccgagcgttaaactattcagtgcatggttagggttaaaaacccgggttccctctctgtaccagttaccaagttcttcagacaaagttgagtttgctgttcagacattagctgtacttcttagcgatgaccttgtcgggtagagaagcatggcacagtggcactttccagctgtattcagcctatccgtcggggtataatcatgctcagtcccagcaccgcaggcttggacatatgttgagttttatttctttcttctgacattaatcctattcaccagctgttctgccagctgccattcttcagtttagagattacattttgggggataccaacaaaggtctagttgaccactgctttctttttttcacttattctatagaaatgattggacctaggggttaagagaactcaatcttttcccactatcacctcacttttctttggattctagacattaacatgatttatgatcgctcttagtgtgttgtagataagccttccaaagcgccagattaccaccttacttataaatcccctttccataaaaaggttttaagtttacattgaaggatataattaatgtttcttatgctattatataaacaacattaattagtggcaatttcttttgatgtcctaaaacatattccagctgaaaatatactttcagttcttctttgtttttccccacaggtttgataacatatctgagttaagatgatacttttcctttcctgagctatggtttcactaatcttgtttgaatgggctattaaatctctgttacactcataatatatactaataagtagtatagatttctcactttgtattccagatgatctgcccataagcaggatgttaaacatctgtagtttaagcctctgggactaacaaatgcattaatgccagaaagaaatgtggcctggatgataaggtcacagaccatgtggtaaagaaacatccccaatattaagtctgcacataccctccattgttaatccttccattttcataaaggcaaaaaagactaatagacttaagttatcatcatttacagtacatatttattacattaataccaacaaatacacaaaatcccatatgtgttataattctcctcgctgatattttgaagtcatttaaaatgtgtacgcacatgcctcacaatagcattattttagccattaatttacctgcctacctaagaagatgacatcaatatatatttgtttatagacaaaattctgcttttgcctcttaactttgtggcatatgtaggtcctatattatggtaaataactcagtttaaatagcacctttaggctggagccattagaattgagaacaccctactgaaacacacaaaacaacaacaacaacaaaaaacgtaatggtgtattctgcaaggtaggtttatttgtttattcgttctttcatccatccatccattcatccatccttcctttcactcatttatttgtttatttatttatttatttatttattcattcattatattgagcaggatattacttattgagccacataaaagaaaacagcatcttgtgtttaccagacagcacaacacctcgtatatatatatatatatatatataaatttatagaaaaatgagaggaagtttataaattgcctgctgaaaaaactattgattccatattatccccctatcttctcccaaagctctgacagtagtgaaccccatttactaaatatgaacattctatttatagaaatattcatatttttattggtggccaaagcactgcttataggaaaacctacaggtgactaataggagttgctcactaagtggaataatgaatagtattaggtgtcaattaaatcaagcttccccgaggtgcaggtgctccacaatgtactgacacatttcaagtagcagtgccacttcacccatgcatatgaacaagcacatttgcatattaaaaagctgaaaattatttaactgaagcaaaagtcttttagagatgatggaggttattaaaactgttgacaagaaagaaggtaattgcctgaaaatgagagatgacattctgctatacacagggaacgttgtttttgttgtattgtgcagcagtgcctgggtgtataacctattacattgagattgctcctatgcaattagaccctttttgtcctcacttcaataaggctatgattatgaaggattgaagaacacttggcatattgaatgtctgttgtttttataacttcgtcagaaatgacaaaacacgttttgtgtcctgttttttctttgtaggcttattgattctgtgattataatattcataaaagacaatgtgttcatggttgaacactctgtcatttatacaggttttatttttttctgtctcagcatagtatttgtttgaatgccaaggtgttagtcataagatgagcagatttttaaaagtaaaagatgaataggtgagaagtttatcatgctaataaccccaaatattactattaaaagtgtcataaaatggatgatttcataggtttcagatggaaataattcaccaactaagaaaacttgaaagctattttatttactctttgattttgagctgtttattttcatcagattttttagtgctcttattgtgctttggttgtgtttgttagaagaaatgaagattcatggccctagaggaagacactttcttgatagtctgagagacagtacatctgggttgacttaactccattctgagggtagtaaccraaacaagtacagtgaatatggcagttgaaatggaaacatggaaatcattgcaggtgtaggaaatttcagattttttgctttattaatattatgcttgttaaaagactttttgttaaaagactttatatctaatcatcttaattagacttcagctcccagcagaaccattgtagcaatacttgaagtccattttcatcactgtatttttttcttgaagatgagtattggtattctttgtgacgtagccattgtagtgtattcaggtggactttaggcccatgttaaaccacattttactctgggccaatcaacttctgcttttattccttacagagatttaaatcctggactggtttgtcagacacagaattgataggctgcgaataaagcccagatgcacctagaaagttttctaggagtttgtcatttatgtgctctttttattctttgatttggatgcatctgggctttagtaaatcaaaaggcacacctaggttttttgttagcagctgtctggtttatctaatctgacgtgttcatttctttaagttgaagacagaaaatgtctttaggcatagcaatctgactcttgattagaaagataaaagtgagatacctcagttgtttttgaacgcacattatttactgcctgctgaaaaccttagctatttaagagatgaaaatcctgaggtagtcatgctcaaagagtaggttatggaagctaccagagtrtgccagacttgtcagttacttcatatgcacagatctagtcacatatcctgcaccttgatttctattcatacaaccagggagttgtatgaaattgttaattttattccctaataggtcatcttgtttaaaactgttaagaaaaatcttaaccttacttcatgtaactgattttagtagggagtaataattgtttttaactatacaaatagctaatggaaaatttttttcttggtaaattaaaatttttgttttaattcttgccatttgttttggtgccattacttaatttttttctcaataaattcattaatatgaggacatcttgtgcccagaattcattatattattttatctgacctttgaataattatcagtttgtggattagaattttaaaaaacaaaggtcagaaattagctttcattttaatttgtgaaaaattgtatactggatatatttatgttaaatatgatttgtttaatggagactaagaaataggtttgagacaaatcaggattgtagatctctgaatgtgttctggaaatgaaagtattatataaaatactttctctttgtccaaggataacttctacatagagacatcatatagtactgagaaatcaaaggtgtactttttggtaactgaactgttatgaaacttcactatctggtatgtcattgacaagccctcataggcttatatatattaatagcatgtccccataaatgttagaatatttaataaatgaatgactgggctctaaaatatcttactaaaaagtatatttgaatgtaccaatgtttagcatttcagtggtttgaagaaaattctagctttagaacatatctgctttctccacttagatatctacttctgatactgctttttctcatatttagtatatctaatgcccttgtaaacaaacacaaagcccacaaaccatcctattatgaggatgggaatggtaaaaatgagactataaagcatataaaaagagcaggttcaccaggtcatgtggacagaagttgaataaagtatttaggtggctgatccagagtaggataactataaactcaaatatattgaaagaccaggccttagcatagtcttgagttgagcaagggtttgaagaaattgtatatgatgggaagagaatcttctgaatcggggttatttccagggaatactggacccttgagaattcacactgtactcctgccttttctctactccctctcttgaacatttttcaggtgaaatcaagttaatgaatagccagtgtacctgtaaagtatgaaaggcagcacaaagcctgaaggatatatatgaaggtgggagacaatgttactaggaagtttggctcaattccacccttctcttttttcaaaggcagattaaatgtatgtgagcttaaatatactttaaatttcatttacaacccatctttcttcttccctgctcactattttggagtcaatgggaaacttaggaaccacctgacggtacccaargcccaacaaagcttcccagtgtggggtcaaatgtgtaatggcttgactttgttgtataaatgagtataccaggaattctctgggtctttgttaagttaataatactctaatcgtacatagtttacagtttgcaaagggcttttgcatgccttatttcagcctcataaaaattttgagtgtaaggaaggacagatactcttatgctattctagaaatgaggaaattaatgattaatgtattgaatagctggtaaatggggagctggagtaaaactttagggcacttaatacttatttcagtgttttttctattcttctatgtttccgttcaacatggtaagcacagtgtccaggtggagtacttgagtttaatggggccctttgagctaacttgcatttcaggcttattaggattgcatgaactcagttggcctgtactttacttgaccattgttaatgtcttcagggtatgaggaggttctttaaatacagcaatagtataggaggagcgtgtgtgtgtgtgtgtgtgtgtgtgtgtgtgagagagagagagagagagagagagagagagagagagagagacagagagaagagagattaaaaggagagactaacaggaagagatggtatagcacaatatagcatctctttgcccccaaatacctaatcaaataaactattgctcttctcttgagtgacgcttttcatcagaacaacrattttacatttcatagattcatctacataactatgttaacaacagcaacaggaaagtatatttgtgttttcatgttgctttgaaaaaactgtcaaatttaatttttttctagcatttttcataacaaacttcttccattaaaaaaaccttatggtggaaaaatttycaaacctacacaaaagtagagaaaatagtatgatgagcmcttatggacctatcatctagcttaaacaatcataaatatttcatctgttctaccacttttttggttaaagtttaattaaaaaatataaatcatgaaatatgtcaaaaaataataaacccaaatttctgctactattatttaacagatattaatagtttaaatttatattccttatatgaaacatgagcacaggactgcaataattggaagatagaaaataggcaaagggcactgaaatagaagagaatggtaaaagcacaattttccaaaatatgtctgctagcatttcctttttataagacaccactacacataaaaattcatgtgactcataaatacctcactgaacacagtgatcatcatattaaaagatatcttagttatattgaagtatatgctatatagagagagcatatagcatatatatgctgaatatgaattgaaggatatgctgtatctcttagttatatattagtaatatcttaagacaatttggcctgcagtttagtaaatagaatgtccaggagcattcctcttcttcttgatatgtactaagaatttcttgctgccaggtctgcctgttgggaagtcagcaacagtgactaaaacttcagtagactctttaagcaatgacgttagtcattgcttagacacaaaactaagttgcatagatcccagtacacactgagatgcttttatctagcagcttattctgaatatcaccgtggaccctggaaatctgtaaaagacattctcttattcragaaggaaatcctctccagaggcaagaaataagacaacaactggatattcattttatatggctttaaaaatcatgatattttgctttatttcaagaagctcagtttcctgaatttgtgagtacttttaccttggaacactgtatcttatcattttataaggcatataatagaaacgtattcattttatttttctatgccaaatatgtattctcttgggaaattctaacaatggaaaatacaaacaaatgtatattatatttgagggttcatcagaagactcatttgcttccgtatcaattgaaaacatttacagagactttaggtggttttcctgccatagcacatttgtattagtaatatagttgaaataacttttattgatttaggatcaggcaacatctcagaagtatctctgagtctttgtgatgatcataggatacagcataatagaaagtgtagaaaattgggtgaatttttcattcattcgttcacagacatttattgagctcttgttgcatattaagcacagtgacagtcactggcatgttgaaaaacaccctgacatttaaaattttttaaattccttctaaaaatatatataaatatatatacatatttgggatggagtttcgctcttgctgcccaggctggagtgcaatggtgcgatctygactcactgccacctccgcctcctgggttcaagtgattctcctgtttcagcctcccgactagctgggattacaggcgtgtgccaccacgcccagctaattttttgtctttttggtagagacagggtttcttcatgttgatcaggctggtctcgaactcctgacctcagatgatccccctgccttggcctcccaaagtgttggaattacaggcatgagccactgcacctgccttaaaaatattttttacaattattctatcagtttaatattaaaacattcagttaattagcattttatttgttgtagtctagttatttgatattttaatgtcatttattttgttttttatatttaatgaaagaaaactggcaggtttgtttcatctgttgtccagttaggctcacttgactatactgcccttccaataaaacctagaaatagtctgttttatctaaaaaattataatttataatctaatttgcaactgaagtatatactatgtgcttttaatgtaccttagttatatgccaatggtcataaataagaagagataagaaagtgtttagaccttaggacatgtgtttcattattactgaaaaatcattcaaaataccaagcagattaaatgagcacagtgrtaggcacatgggacaagaatttgaataaaatacagctttaccagaagaggctcacaagggaaatagtagcgggtgggtttggtatggacgtaggggtagactgacatacgtgggtttctattrcacccacacttcctggatcayagctcttctaaaacacatttgcatttgcttggtgatgtacctgtattccctagtaaactgatgctcaaccagggaagggcaccgtgtttgtttaattcacctttttcttcccagaacctagcatattgcctagaacataaaaggcgatcaataaatatctgttggggagtgaatataaaagattatattaatataatatgttaaactatataatagaagcatgaataagaagggaaatgtagagtaaatggtacgagaactaaaacatcttctttgaagtgtgtaaaactgaaaatattctatatccacgtacagtaaaactaggtttacttgtactctgtcagaacactctttcaacagatatttttgcctattgacaaatgacaataacatttgcaaattgttaaatcattcctgaagcaatacaaactaaattatgttcagtagcaaataacataaactctatgaaaattaatagcccatgtactaatgtagtaactcttttagttagattatttaattagcatgaacacccagttctctactrtaagagatatcagaagcagcttgatagacttgagagagaaggtatctgtagtcttaggtgattggagttaacattttagggttgaaaataacacttctttcttgctaaatattaatgtaagaagaaagaagtattctatctcattattaatagtgtaaacacattatttaaatattgatattagaaactgtgcataattatactctgaatttggtcatcttttatatttttcagcaagtctttctttcaagatttctggagtaccttagttattttaaaccataactgctgaaaggagaataacatgaatctagagaactttttaaaaagtaactgaaattatcgaacattagcagcattgaatagagtttcctctctgacataacaagaaaatatggtaaatataatcattctttgttataggtttgtttgtgtccttcacttgagataatttcttttgctatgtagtgcttaagaacacaaaataaaaataaaaatgttcttaataaggtttagcacctttaattgaaataaaattaaagccacagaagtaatcttttagtgttttacaaagggttttcttatgttagtgttgtgtgtttatgtatgtgtttctaacttcttttgaaaattatggtttaaagaaaattattttctgataaactatctagaggtaacttatttgggataatttattgtttcaccttttgaacataattttcttgagcaattttattgtacaacataaaatcatctactttttattatgaaagcattcaagaattctatgcaatgtttttgatatatatttctattttaatatttttaatcaatttattttttaaaagtaggttgtcaaattttcttgtttatgattgtttatagatactgaaaacagcctgtttcttgcatgaatactatttgagtcatctactacttgaaatgtggtttggatattgccattcaattgatatgaactgggtggcaccaaaataaatgttttcatttttatatttggctttgaccctcagcagagtcatatatatatatatatatatatatacaaattatatataatttacatatatatacaaattatatataatttacatatatatatatatatatatatactcacatctcatagggctccctttctctctctcaccaaataaattttgattctcccatttttaatatgggcaattatagagttgtatttgatatcttgccaaaatattgggcaaatatatgtgtgcttgtataatcacttcaagtagtaagaacattaattttaaaactgtggtttaaaaatatttttaattttcatagctgataaagtagtaatggattgtcaaaatgtatagttttttggcgtatacatattttgacaattgatatttagtttgaaatttctttaaataacctccaaattcatacctatttttgctatggtttaataataaatataattcaataataatgaattatatatcttcaaaatggcaaatagactttcaaaaactgttcaggatcaaatgttcttatcatggaaatgtgtttttttaaccaccatttaaaactgggcttaaaaatttaaaaaagttagkgggtatcaagaaacagttatagctggccaatttgatagagttactttgcatattcaagaaattcctgtattaatctctacttcacattcattgtgtatgtaatgttccaataattaaacttgtaaacattttaaaaataaactttattttgagtccagaaaacttaactactttcttgatgaaaagtaaaataaatgaatatctgtatttctttccaataaagactggcaggcatggtttcattatcctttcatcaaatacatattctttattattattttataatatttagtataagaattatttgattgcatctcttcacctcaatggaagggaacagatataaggcattttatttgagtttcatgactatatatttgactgagaaatgaatatatgaaaatattgtggtaaacttactgagatttatgagagaaagtatcccaaattaattttttttcttgcatctactgtgcattgtatgtcctgaatttcctaaatctgtattgtcctttttagtaaaagggtgtgtgtgtatatatatatatatatatatacatgattttatatatatgtgattttatatataataacttgtgtatataacttgtctaatattatgtaacttgcttttatgttaacgtttatatttgtgtgttcgtataactcagtgaaaatacacataataaagccatgacttttttggaatctgaagatatgaatttgcgttggtgtatcatcatgggaaaatcacttaacctttttgaatcttttataatattgggaagttattacctaggtgacaacattaaataacacatttaatgaagcttaaataatatagaatgtttaaatcacttgccagacttaagtactatattaacagatattaatatggaatctgttttatagtcaccatagggtctattaaatacgtatgttattgattactaagaatcaacaaagttttactaggtttggagattttgttccaatcacttccactattcctgaaagctttgattatgtctgacaaatacagtaggaaaaatgaaatacatctgtatataatgtgtggatataaatatttatgtgtgtctttgtaaagattgctctatcttgtgggaaaaatactcatatcttcaatggtaattcatgtgtctttcattcaaataaatgtacgaaaacttctttgacatagcattttggggtctctgttactcggagagagagagagcatgcaggcagggtagcaatgaccatacacatatatgtgacacatacacgaccaaaagcaatttgaaaagctatgacttctgaacatttgacatcttggatccaattttattttttaaaggggtttattctgttggtaataaagttttaggctttacttctgatacttggaaacttctttggaagggcagatgtagagtgaatagaaaaactctaactctcgtgtagctgcaaggaagtttatcctctttctactgtcctactttgttgagggctgactctttcagactgtagggatgatttaaattaatgacaattgtactgatctgctataactccagagtacattttgttttyaactaaaatggatttggtttctatcaatatgtagtatttatatgacaaaacgataattaaggcaaaggaatttattgamatagtatgttatttatgttattacagtgtccttatatatgcatattgaatattcatacatataaccatacaatatgaacacctttctttgtttttaaaaatgcatgtctagcacataagtaattcaaccgtacacaagataatacgattctctttaactactggtgccattagtcatttggtgagaaagtagctcatggtctatagggaaacacagtttgatttggattgggttttaagaagtcattgttttgtttggaaaatgtgaaatcggtgaatgagcttgttctctttgtagaggattacaataacacacggaagcttatgagtgcttctgacagatgtgttggcggtttgccacaaagtgaagggtgcggccctgactgacaacttgcaattatattatgatgaatggttctgatgtgtgttcaagagaaaaccactttctagaaagtgaaagtcatgcatacggtttctataaaaaaaaaaaaagctcaaataaagtattataactttctattttatttaagcccaaatttggtgggctaaccaatttgagtcattcccttctcacaaaggtctctgtttttgataaatcaaggacaaaatccaaaatttttgtggggaaagcaaatttgatatcatttttggcatcaaaattactgtatctgcattttcgacaaaactgacatctccaaggaaatatttgactcttacgcatacactgaaaacatatacatatgtccatggttggccaataagactaatggagtcaagcattgagaaagaaatggccttttttgattaagtcatttcttgatacattttgttgtttgcttaccattgaaaaactttgttttcaaatgacgtgtggactgaagctttgggtcattttgaaattgttttcacccttttctgatttaatttatcttaagaaaactctgagtatagcatccaaatatagatttttcaagagttagtatgcctcattggtatacaatttaattactcagtaatcaagctataatgcataaaatatgtattaactaagctggcacttttgttttcatgaattaagaaaaagttgattttcaaaaactaaatcaaataaaaatgtgaaagtaggttttgggtgtattttcttgcacaatacttaaattgtgcaatttgtaactaactttcagcatatttacctagcatatcttatttaaaatactgttattttgaaaatgtaagttttcatctgattctctgatgttcccaaggcatattattattgaagttagtcaaggactctgtattaaaaatatttaataagcaacattgtaattgtgaagatgaaattcaaatacatgctgcaacatttagcatataaagaaatatagtcacaatagccaaactcttcagaaattgaaatatgaaagtgagatattaaatagtattatttttaaaagatagtctaaaaactggaggaagagaattattgatttaccctatatttctcaaaatttgtcatatgattttgccttgtataggttaaaatgaggtcatataaagtcttgatatgatccaaaaacaagtttcttaggaatttgaatgactttatatctcagttttatagtatccagtttttgtcctttggacttgttttcttttcattcccttggtaacatttagggtgtatccactgttgtatttcaatagtgggactttttcattgttactgaaatacattaagcttttcagagtaaaagaatggcagtgtggaaattacagcattcttgtgaaagtatcaagagtcctgcagtttcgttgtagacagaaattctaagaggaaaaaaagacactcacataagctttttagtgtttttgctcatttcacattagtcttcctgtacctattttttcctctgtggcatcaactcatcatttaccatttgaacctatacatccaagaataggaaaatgaaggcttgatcaactggatggttattgttttctttttgggtttctgtttttgaagccctctgaattttctttaccccattagatctaggtctatattctagcctcatttaataatctataagaattttctgtcatttaggatttgagtccttactgttaaagtgacctgtaggttttctcttcatccatgttcaagttgataaaayacattattttcatcttcaggttttctttcactatctaatttctttcttttttttttaatcaagctctaaacttgatgttattgttctggggccccaaatctttgtgcttgatttagttttcacttggaagagaaatagtcaccatctatttgcaggtgcaagttaaggcctgttagaaagcttgrcgtctacgctatgagctctgagtaatattttctagtgtatagttttgatcagatgaagtgtgtatttgtgggaagaaagaagcttgtattgttttatgtttgtaccataggtcataattactgtattgtttatagsataataaactcattaggcaattatgccttgttgggttatttgaaacatttgtttttaacttgawtgctctcaggtagrtaataattagatttcatttgggatcttttatttaaatgaaagttacccagaataaactgcattttttttggtttaaaaattaaaaaaacgttatttggcattttggaagtaagctaggctaaatagtagtagcaaaagaggaaagtcagtttttcctctttaaatggttgagataaggtaacttaacattttataagatttaggtaaaatttgcctggattgttcattgttgatcctatcaatcactaagagagawatatatatataggctgtgacttwtatcaagtactttctgtaataccaggcattggccaagtgcttttaatacatgatctcatttagtattcacaataactctatgatgtagatactattcttactttgtaaatgataaaattggcctaaccaaggccacaaagttaataataggcagaaccttactttgaaaccacgttgaataactccaaacccaatgtgattaattatcttgctatatattaaactataagggaaattgactgtaaagtgaatgctacacttccaatcccccagcaggggaggaaagaaagataaacgaatgtgggattttctatcttcactcctgatccaaagaaagtgtggagtctttggagcagctataggctgaggggtaaatggaaggttagtagcctatgaagatttatcttttgttaagtacttgtggaagataccagactttattgtgcagtccaattttttctttttattctatctgcttctttgtaacwggagctgatcacacagtgtttacagtcagcttggattccataacaaaataccacagacaggatggcttaaacaacagaaatttatttttcacagttttggaggcaggaaagttgaagattgaggtgttggcagatttggttccttgtcagggctgtcttcctgcttgaagatctctgtcttctccctgcatcctggcatcctcacatggtggagtgggtgggggcagtgagagggataagagggagatctcttcttctaaggtcaatagtcctgttatgaaggccccaccttcatgatctcatctaaacctaattacctcccaaagaccacgtctccagataccatcacttagagggtagggcttcagcatatgaattctgggggaacatagttcagtccatagcacagagtcctctcatgccccttaggtaatctgccttagagcaaggattcttcggtgacaatgtttaacatatatagcttctcccactaaagtgttctttggtgctaggcatggtgagcatttatgtcttagattaaacwgtttttactagaatgctcactgcgtgtgaaaagctaagtgttttaaaaatgttacctcatttaatctttgcagcaaatgaagaaattgtggttcagttatacttcaggtgacaaaattattaggtgctaaaactggcattaattaggaatgttttaagatgcaagtatcyacaacaaaagaaaacaaataaaacaaaatactcaacacactgtagcttaaagaaataggtgtttaattttttcacatagcaggaagtctgaaggtaagtggtttctggtatgggtacaggaggttgacaatgttaggacttgattgcattcctgcaaatcctctggccttccctttatcattataagatggtcgcagcaggcccacattctgtaagagggagcagtggatggtgcatgacgaagaattattctatttataccttttttatttgggggacagaggtaatcaaggttaaaaaaattcttttccagaagacccatagcaggctttcttccatgtctcattatctagaactaggtcacatgactaatgaccctagctgcaaaggagactagtaatgcaaatgttttgattttccagtttctcaagtggaaagcagttgaaggagaagggaatcatgaatggctttttcattgccaacctagtctcttacagggctacacttatagccaaggtctttaggtttagtttctacctttctggcagaatctctaactttgctgaggaaggacttgcacatatttttgcaaatctgagaagtcatatttttgtgtctctttagagataattttgagttacatttacagaaagtggtagaartaagtttggacttagactttctcggtcaggatcctacttctactatatattagctatctggacttgrggaagtttcccaacttctctgacctcattctacatacttgtatattttaatgcaattcatatatttaaagtacttagtttaatgtacatcatattatatcaagtgctatcatatcagatactcaaaaactgttatagtatttattccactataggtaaaaagagaagaaaagtctcccagataactacaaatattacaatatgaatctatttatatttttgatcctttgtaataaagtgtctaagatgatattcacttcctgatctgaggaaagctaagaagtacttgaaattattacatgtgataacaaaaagctagataagttttccaagaaaacaaatgcatatatggtttctatgtgtaagttgctactccaattccaactctattgctatctctgtctaccctttctgaaatgtcctattctctaaaatacctatgcttccttttcccttatcaaataggccctttgtataagtgatcttaggtgataggaggaaaaatatttgattaaggtattttaaattcgattaaaataattcacaataagatgttaataaccaattggcttaactccccaaaggaagaggtgtttttttgttttgttttgttttgttttttgttcttttttgagactgagtctcgctctttcgcccaggctggagtgcagtggcacgatctcggctcactgcaagctccgcctcccaggttcatgccattctctcctgcctcagcctccccagtagctgggactagaggcacccgccaccacacccggctattttttttttttttttttttgtatttttggtagagatgaagtttcaccatgttagccaggatggtctcagtctcctgacctcgtgatccgcccgcctcgggctcctaagaggtgttttgttttaaagatgagcttatgaaataattgcgaagaatccttactttgtgtaatatgtaaggggaatttaagaaaatgtattataaaactcaagtgtacaaaaagctagaaagaatgttataattaacccttgtatacccattacttagattctagacttttcaagattctgcccctctgtatccattagtcttttattcctttttcttttatttcttttctgaagtaatagggaaatttaaaaagtaagacatagctgtccaatgccccttgcctaggctacctgcatactattatacttaatgacataataataaggtgakaatttgttacacaaagccaaaaggcctaataatttatttaggggaaatctcttagttgagatttcacgtattgtctttgggttagctgtctgaaaatacttaagaatgaacaagtttgattgtgacctttgtatcactttctatgctgaggaataacttcatttttgggcagcatgatgaatacagcgcctttaatccttttgtttttaatttaacaaatgtgggaatgtgcaaagaggggaataatcatttgtcttcttgctacccagcactaaacatggttaatctctttgcatatttacctctgtgtgtttttaaagaaaaataattgttgtttttyttttaaagatccttttgagaaagaatcaatacagaaatgtatgaaaattaaaaatagaaaaattaataccaccacctagaaattaacatcattaatattagatagatatcattcttacacatttatacaaatggaaggataagtgagtgggcatatggatgggtggacaaatggaaaggcttttgtaaaaatggggtcatactgtagatgctatctaaatataaattgatacattttattttactttatagaaaagaagaaaccaaggtagaattagaggagttgctgaatcccaaatcaatgtttatttttagcattagggataatatttgctaaaagatttcccttaaggcttaaaaactggagaggagggacattatgaaaaattaagaggctttctcattatgtctagtttataaaagctacatatttatttttaaaagaaacagttggctttctgttttgaaagataagggcattatacactttctcccaaatctctactgcccacttctcagtttttgttaattattttacttttgcattgtttaggtttataacatttacattctttttgtatttataattcccatagttgttcaatgtttattctatatgtatatgaatttagtcatcactcctaattcttttaccacagcttctctttttctgactttttttyactttttcttttagttggcagaatttcattgttaagaacaaggccctcttcttacagccccctaagggcttaggagtgtagtattcccaaatttctataacatttgtatctacctgtttttcatcttcgtatgtgacatctttctttagcattatattcttgatcatgttttttttcttccaggatttttgtatttatttcctcctggttgcctctttgccttatctccttagaagatggagaaaattatttctcaggggtgaaaaaatattgaggtagatgtgggggagaactcagctgaggtgacatgtagcttttatttgggatctgagctgtctcctctgagattttgcaatttgaatggggatcagggtctatcattcattcagaagaatactttttggatcattgaccagatttattstatagactagattatttacatctgtcagacagaaatagccctgtggttcactttccctatattatttttcttcttrtttttcttttctactacagattgaaaatgaagaagataacaaaacttgttcagtttgcttctttccagatttggaaatattaatgacaattcttagtattttgttgactcacgcacatcatctctatttctttccttggttgctagtttttgaggtttattacatttagttattttgcttttcctgtttggtagctgttggtaattttttttctgactttaattttgtattttaataagtaattgacggagtgaaatttgtgagctagttttgatttgccttcataatcagaaatcttgcatctttaattcttgttggaaaagtataattcaataatacatctatctaacattttcaggtaacattttgacttaaaccatgagaagagacttgattgctaatattaatcccattttaaaatacatatatctcaaggccagcatcttcttcagggtctttgctactcaaaataacattgtgctagatggagtgttatagcacatctgctataaggctagatgaggttgaaagcagagaggttgaaaatgtcaggagaggacaggaagcaatacagagttctagaatttctcttgaatgtatatgggaacttaatttggtctcatttatttcattcattaaaagtcatttttcatctatatcttgagacaatgttttctagaactatttrttattgagatttaaatcagatgacttattttctyatatctataacaattgcagtaattataaaatattgattggttggaaataatgaccaaattacatattttgctaaagatcgtgaaattactttagcccataaagaataagctttttaatgctaatgatactgcagtaattatatacactttatattctgttttgagactgtttatttttgctcctcaaattttggctaggtgggcaaattcagtgtagtgtagagattttgtagtagagaaattgaaagtgtttagaaacagaaattatttatggatttaatcatttgtgaagtggatagatgaccatcttcccccctttttttggtttctgtgttcttaaagtctgctaatcccagcctcgaactgttcttatgtagttyatagtttatatgttcttcacaataaaagagattgatgagattagatgaatgaaataaagaaactttgatcattaacacaatttaaaatcaaaggtctttatacctggraattaagaaaagaaaaatttttactaaaaactgttaaataaaaggggaaatataatctgaatgttacagaactaaaaaataattatgaagaaaacacttcattttgaaatttatggaatacattttaaatggtgatcagaggaaaattctattttattaatataattaatcagtaaaattacagagtaaaataaatgaattaaattataagttaagaaaatgataaaaaagactcaccaatgaaccaaagaaaaaagcaaagtaataaataatgaagataaaaagcagaaattaatgtgataattttaaaacagtttaatcaaaatatagtttaaaaataattaatatgtaatacaaattttaactaaattgatcagtaacttgaaaacaaaaacataaacacgcaaaatattgagtgacaaaagtaaaatgacaattaaattacagaaaaatataaaaatcaaaagatcccactttttacatttatatgcaaataaatttgaaaaccaatgtaatgtggatcattttctagagaaataaaaataaccaaaattgactctgttaaagwtagaaagcctaaagagattgatttccatagaggagataaagaaagttatcacagaaatactcttaaagcactaggcccagaaagttttacaggagaatgctatcatatcttcaaacaccagatagtcccagtgctccataaatcattccagagcactgaaaatagaggaaactttctaaatatgtttatgaagtaactataacgttatacctagactgagaaaacagtaccataaaagtaaattgcagaaattcacataaatattgatggaaaaatactaaataaaatatgagcaagtataatcaaataccacattaataatagattatacaaagttcaagtggaattattccagtagtgcaagcttggatattccttaatagaatatattatatttatggatctaaggaaaaaaagtcttggaataatctccaaaatgttgaaaaaagctgcaaaataatttgtaacacatttttgataaaatactcaaaatataaatggatgtattctttctctgatttctactgtggtaaaataaatataacataaaagttacagttttagccattttaagtgtacaattcattactcttaattacattcatagtttttataactatcaccactattcccaaaactctttcattaccctaaatagaaactctgtaatcagcaaacaataacttcccattccccagtcctgaaactccctggtaacctctactgtactttctgtctctatgaatctacttattctagatatgactaggtagaattatataatatttgcccttttgtgtatgacttttatcaactagcataacatgttttcaagattcatttatgctgtagcatgtgtcaaaactacactccttcttatggctgaataatattcctgtgtgtgtgtgtgtttgtgtgtgtgtgtgttattacattttgtttgttcattsatctattgatgggcacttggtttgtttttacattatggctattggtaataatggtgcaatgcacaacattggcatatatgtatctgaattcatattttcattcttttgagtataaacctaggaatggaattgctgggtcataaaataattccatgtttagctttttgaggaattgcaaaactgttttccacagtgactacaccaatttattcctcgcctcccccgcaatgtaggaggattccaatttttccacatccttaacaaacatttgtcatttttattttcttttttaaaaattatagtcattctagcagatgtgaagtcrtatgtcattgcagttgtgatttgcatttcccaagtgattaatgatgttgagcatcttttcatgtgcatcttggccatttgtagatattctttggagaaatgcctgttcaagtcctttgcccattttaaaattgggttgtcttttggttgtcaagttgtagaatttctttatatattgctaatattaaacccttatcagatattattgattatttattaacaggacaaaatactctagttctaaagtgtacaacttacatatgaagaaatgctacaggaatttcccttaagatcaggaacaaggccaagctgcccactgtcaccactatattcaacatttttctgaaggtattagccaatgcaattatacaagataaatgaattagaggtataagaagttgtaacgaagtaaaattatctatattggcagatgatgtgatagcatacctaggaatgcttagaaaataaattttataataaaagaaaaattcttccgtggtaaaattaatatacaacaattaatagcttttgtagaaaatagcacagccaattagaggatataattaatggtagaaaaaacaccatttgccgtagcaacaaagaagattaaatatttaggagtaaacttaaaagaaaatatacaaatttcatatgaggaaagctttaaaataatcctaaaagacacagtagtacatctgaacaaataaaacgacatccccttttggtggatagggcaactcaacatcatgaagaagttagttatttataagttaatttataatttttaaatttttataaatttataatttataaatgtaacacattccccgaagtttttatgatgaggctagtcaagttgatactaaagttcatatggataaacaaacatgcaagaatagtgaggaatatacttaaaaagaaaattacaaatgcagggggtatgagaatagtcctaatagacattaaagcaaactataaagtctgtaattaaaactatggagtacagtaatggcaaatgaataaacaaggagaataaagtccataattaaacccaaatatgtgtggaagtttagtatataatgaagttagcatttcaaatcactagggcatagataractttttaatatatggtatagccatatattaaattcaaatgcggtagccatttaaaaaagataacgttagatctatacttaatactatagaaaagaataaactccaaaatgatcagagatctaagggttaaaaaaaaaagcaatatattgcaagaaaacataggtgaatttctcttgaatgaaaggccttatgactcagaatccagagataataaaggaaaagcatgctagatttgaatacatacaaataaaagtatttgcatgttaaaaagatcataagtaaaaccaaaacaaaacytacaaattgagagaaaatatttgtccatatataaaaaataaaggactaatattcctaatatataaagaactctggaatttctgaaaayttgagggaaataaggacaaaaaaatctcaaaacaaagagaaaaggacatggatagacaattcaaaaaacaaatgtaaaaatggccctatgtagcctatgaagagatactattttcaattattgaagcgatacgactgtcagatattaagaaaggggtgttgaattatctgacttacaattgtgaatttgtcatttcttcttgtagttatatcagtttgtgatacgtatattttgaagctctgttactaggtgcataaacaattagaatgaccgtcttctctatcgtatcatcatatatcatatcatatcatatactttgccattatgaaatgaycctctttatccctgataatagtttttgctctaaactctactttgatatttatatagcaacatagtcttatcaaggtatatatgagttttgctttttatccagcttgactatctctaactttttaatgttatgtattgacaaattatagttgtatrtatttatggggtacatgatgatatgatgatttttgaaaatgatgtggagtgattaaactaacctattcatcatgtcaaatatttgacatttttgtgacaaaaacattcgtgatttactctcttagtgatattgaaatgtgcagtactcaattactagctatattcaccatgctatacaatatgtctaaaaaaaacacttatttttcttatctaactgtggctttgtagccattgattgccatctctccatttccccataccctagactctggtaaccaccattctactctctccttctgtgagttgagttgttttaaattccacatataagtgaaaatgtggtatttgtctttctgtgtttggcttatttgacttagcatgatgttctccaattccatccatgttattgcaaatgacatctttcttcctttattaaggctgaatagtattcttttgtgtacatatgccacattttctttatccattcatccattgatggacacttagcttgatattccataacttggctattgtgaatagtgctgcagtgaacataggcatgcagacatctctttgacatactgattttaaatcgttcaggtaaattcccagaaatggaattgctggattatatgttaattatatttttaggtttttcaggaacctgcatacagtttttcataatggctatactaacttacatacccactaacagtatacaaaaattcccttttctccacatccttgccaacactggttatctttggtcctttttatactagctattctaaacaggtgtgcaatgatatctccatatgattttgatttgcatctcccttgtgattaatgatttcaagctttktaaatgtatttcttagccacttatacgccttcttttgagaaatgtgtattcaggccttttgtctatttcttaatcaaattatttgtttttcttttataaagttgtttgacttctttatatattttggacgttaatcccttatcagatgtatggcttgtaaatattttttcccaatttgtagattgtcttcactctgttaattgtttcatttgttgtgcagaagtttttttttaattttaacgtaatcccatttgtctatttttgcttttgctgcctgcatttttggaatgaaatctaaaaaatcattgcccagacaagtgttgtatagtttttcctctatgttttcttctaggagttttatagtttcaagtttatgtttaaatctttaatctattttgagttgattttgtatgtggtataaaataagagtgagtttcattcttttacatacgggttatccagttttcccagctccatctattgaagagactgccatgtatatttaattgggattatctgtgtgagctttgatatggttgtatttaagtctatcattttgctcatgttttttatatgcatgatacagtctgttatttttctttcttttgatttttaaaataataccatgtatattttttgctggtttattagctatgactttctgttgcattattttggtgattgccttggagtttaattgtatacatcttcaacttacagtccaccttcaagagatgttcatagtatttacactatagtacaataaacgtatactttaatttctcttccagattttattattgttgttatacatttggattctacttatcttataaatcttaaaatacattgatattctttttgctctaaacagcaaattatcattaaataatatttaaataaaaagaaaaaattaaatatacacccatgttattgttatttctgttactcttaattcctttttgtagatacagatctccttcaatataatttttttgcttgatggatttcctttaatattccttacagtccagatctgctggtgataaattctatcagcttttatgtgtctaaaattttttatttcatctttttgtttgaaagatatttttgctggatatagaattctaggtagagttttattttttattttagtacttaaaaatgttgcacaattgtcttctggcctgagttgttttcaatgaggaatcagctgtcacatgattttagttcctctacaataacctgcctttttgggggattacttttcagaattttctctttaattcactggttctaagcaagttaattatgatgtacctttgtgtagttttcttcatatttcttgtgcttggtttgaatttaaagatttatagttttcatcaaatttgaagaaatttcagccattatattttcaatattttttcttcctctctccttatatttgaggactctagttatgcatatattagaccacttgatattgtctcacagcttactgatgctctgttcattttttttacattttctgtctgcatttcattttakatagtttctactgctatgtcaacaagattactaattttttctgcaatatttaattggacatttgatttattcagtatgtttttcatttcagacattttggtttttagctctagacatttgattaaaataattttttgtttacatgtgtttcatacctccatttaaccttttacatctttctactagcttagcaaacatgtaaaaaatatagttttaataactcttttaatgtctttgttaattttaatatctctgtcatcgttagttcagtttcatttgattgatagttctcctcattagggtcatattttcctgcttctctgcacacctgatttttaaaaagttgaatactagccatggtgaattttaccttgttggatattcctataaatattcttaggctttgtcttgggatgctttaagtttcttggaaacagtttgatcctttagggtattgtttttaagtttccaagcaggataaggcaggatttatctagtctaatgctagttttaccccacaactgaggcttctaaaagcccttctgaattttctgtgtgatgcaccaaatcatgactatttccacgttggctagtgaagataggactattcccaggcctttatgagcagctgggatgggtctctctaatcctttcagacaattctttttctggcttcatgagttttctcacatgcatctggccgtcgtactcagtagagcactcaagggacccctctgcagatctctggattcctttctctgaagcttgtcattcttcagtactgtgccatgtaatttctagccacctaagtctttttgaacttttagttcaatctcttgactctggaaaataggctttacctgagttcttctrccttgtactgtagcctggaaactctctccaggcagtaagctgggaaaatggtagggctcactcatttgtttactctctctcaagggatactgctctttgttgcttgatgagcaatcttgaaaccttatttctcaaagttttttaagcttctttttttttttttttttgcaggagggtaaattcagcctccgtcttggctagaagtgggtaatccaagtaatgcaaattaaaactatattgagatgacaattctagctcattgaattgttgaaaattaaagatgtgaaacacattcttctgtcaaggttgtgaagaaacaggtattctaattttggagggcatggaagttattataagtctttcagaaacaaatttcacagcrtctgtcaaaacaacatatacactttcttttgatccagtagtcctcttcttggaatttaccctgaagatacaccttcagtgatatgaaaaaagatatgcaaaaagctgtttgttgacttattatttgtaattgcaaacaacctacatatgcatataggagagtgattaaataaattatgctgcagtcccacaatggagtatatgtagctataaaaaagattgaagaaactatctgtaatttggtatgaagtgatttccaatgtaatttaatataaatttagaagaatgtttatagartgccatcttttgtatagaaggaagaagaaatgagataacatacacatatctgttcaattgtgcagaaagaaacagaggaagggtaaactataaactattgagactggttatctagagatgatgggtgcaaatggagtagaaaagatggggttggtgtgagtagggtagaakggatgggatggggattagtagttgagtgaytacttttcatatatttgtgtatttcagaaccatactactatttctcatactaaatatacaaacaaacaaacatgaatgaagaacccaaatgattacacacagagacaaagggatttaactgtatttcagatgatataaycatactgagcatgtataggggtagtgggtggractacctaaataacattggaccagtattttgactatgtattttaagtccaaagaataaaagtactaaaaatattgtactgtagagacagggagagatagagaatataaatgatagaatgagtataaactgttaacatttgaggactttggatgaaggatctgtaagaaatctctgtactatttttgcaattttggtatgtttgaagttaaaaaaaatacattttgaccatgagtttttatatgcaaaatgcctttcctgatgaacaccccaaaacaatttgaagcttacttttccactatgaattatgttaccatgaattatgttacttagacctggaattctgtcctgatattctgcaattactggaagtgccaaatgcccagtcactgttacttgaagactttgagaaaacaaatatataaactctcaggtactatggattatcctttcttccatatctgatgagcagcttacttgaaggtgtatcaaggattctattcaatggcttacaatagttccttgcaaaagtttaaaatagaaagcatagaatactttcactttctatagtacaaattgaagctataataasctgcatataattactcctggaaattttgttttggttaggaatgcaatgggagtgattaggacttagtattgtgatacagagtaagttacatctaggagaactctagggttctttgggaaactataaattasgatcaaggctattgttcttaagcaatttcaactcgcattggagtctcttttaagtttagagttcatcaccatcattgttattattaatatttttattactgttgttatccttgataaaagccacttgacataaactccctaattatcaraatgcttactttacctgcaratgtttaagwtttggattttgagaacatcttacagtgacaaagacaggtgaatttgagggagaaaaatcatctggcggtggataacttggcaagttttgtgatgtttgagaatagagtagatattaaataaagatttagcaactaattgaaatggtagattttttaggtttggaactgtcacatagccatagaatagtatttctcagccactaactattttgctttttaagattcttacatcaaactcaggaaagacctaagaattcttctctgcactttgatctaaatgcatcattgatctgaactcaagatgttaccacagtttttcttcctttggttgagtcacaggggcatttattgcagtaaagccaatgcctatatatttcaaacatctgtatggaaaacataatttcatatgtaaaaagcactatgttayctggcaaatgcactctctaaggatagcacagctacagatactatcacccttgtgacagtttattggtatggtatgcagctctcttctttaaatattacactttggtttgtggctatagctaatgatttacagaacttgcactctgagacattgtctcttttaaagagcacacttttagactggcttcactattttcgtttgttcagcantgttacatttcagcttcctaagaaatgtttctgcctatcttggcagtgattttcctcctcactttagttcagtatctggtctgtgtttatatattttactatatgttcctatattcatttagaccaataaatgtacacactccttgtatactaagagctgactggttttcaggactacattgttgatgtgcttgacttgccatttagtagtaagaagttatgttcgcacatttgatgctcatatagagccaaaactcatagatgtataacattagcctccaatttagtttatagatggattctctttgayactattaacagttgtcaaatttgaakagaggattaagaagaacatcaagttcatcatcaagctgtttagggagctgttgaaagagcctttgtgctttatgtaatcaaaagaactgctcagtgtttgaaatttttgcagaacagtacttagttgataatttgttttcattttttctattcccccctcaaaataataagaaaagggaacatatttagatttcgatcttgtttttggtgctgcaacattttttccttttcaaaagcatactttcagcttttattatcttttcacttaaaatgtaaatgttgaaaatgaatacaggttaaaattgatataaaattttgtgatagaagttttcaaaatcctggtgattacttaatttaccaccttaactctgacagaaatgattcttctaaagactaatggtctgacctagactgcattgaatttgtaagctatcactcatttgtaggtcatttttttttttcaaataaaagaagactcccattattaagaaaaactacacaaaacttcagtgctcagagtatataccccagaagaatttcctggtggggtgggtgggtttacacctgatattgtatttttccccstttttacttggctctctactactaccagtactccctttgaaatgttttctgtggtgctctaagcatagccaaccttttgttacattaaaaagaactgaagtctatggcagaaaaaaattacagaaaataaacattgattaaaacatagtattaaatttaagtgcacaaaatattatttgattgttctaaggatccagtaagatttactgcatgctaaatcttctgatcatttattttcattgattccacatatttttgtttagtgtctaccatatgccaatggctgtgcctgataacgatatagtagtgagcaagacagatggatttcttggcctcatagagcttatagtctgatagagaagattgatggtaaattaattataacaaagtatgacaaaagtcatgatttaggtaatataatattacaatggactgttgaaggcattattgaggaaatgacttttaaattataactgaatgaataggagttagttagatgaaatggagtggttgaatgtttcagacagagggaggagtakgtgtgaaggtcacaagagagaaggaatatagcagatagcagctggtgctttgggggaatttaaagaatttcagtacaataagactgtgtagtatgagggagagagtagagagtggtgagaatagctggagaggtaagtgggttccagaacatgggggaccttttaagctatatgaaggattttgggttttattctaagggtaaatgtttggatgattggaaattaaaggttggagaaactttgtacctttcctagattgcttcattcctaattccccagctacttgtcttcggatgataatggtcacatagaaggtgtcattttacttctagctagagcaggtagacagtrtgtcccttttattgaaccaagacaaaaatacatatatttttcagacaccttgagatcttataatttcagttttgttcctattctgaagagcatggcttgtccatagccaaatgtcagatgatctctttttggctcaggcaatagttgtgttgatctctgaagtagtctctagaggccagctaggttaaacattttacctcaacaaatggggaagtaactttaaaaaaatggtatttattttcattttcacaatataacatatattacttaaggatttgtgtaaataaagaatagtacttctttattttaaaatttgggacattggcccgggcacagtggctcacgcctgtaatcccagcactttgggaggccgaggtgagtggatcacgaggtcaggagatcgagaccatcgtggctaacatggtgaaaccccgtctctactaaaaaatacaaaaaattagccaagtgtggtggcaggtgcctgtagtcccagctactcgggaggctgaggcaggagaatggcatgaacccagcaggcagagcttgctgtgagccgagattgggccactgcactccaagctggatgacagcgagactccgtctaaaaataaatacataaatgaatatatatatgtatatgtgtatatatmcacacacacacacacacacacacacacwtatttgggacattgaagtataacatgcgtgtggtaaaatatgcaatcttaagtgtatctttcactaaatttttatatgtgtttatattccaccacatttttatgtgtgtaaccaccatccatagcaagatatagaacatttctagtatcctggaagactccctcttcctccctcccaatcataacccctgaaagatagtaactattctcactcttattaccatagattaattttgttttcttcttgaacttcatataaatggaactataaagtatacacttttcttgtgtttgactttttccactcaacataatgtctttgagtttaaatgttgtagcagatatttgttctattttgttctatgtctattggttaccattgtatcaatgcaagctatttactaactgtagcttcacaataaattcataaggcagtcagctcctttaattttgttcttactcaaaattttttttactgattatgggcctttgtgtttacatatacattttagatatacttgtcaatttaaaagaaaatacttactgggattttaattgggattgcaatgtgtttatatatcaatttagggagaatttacttcttaagaatgttgtgatttccaatgtatgagcagaatatgtccatctatttatttaggatttcagaaaattattaaagtaatattttgtagggttttaatggatgtatgtaaacaccctgtatattttgtagatttattgttttttaaaatttattttctattttttgcaaatatttgaaataaatatattttcatattagcctcatatccaatgatcttgctaaatatatttcttaattctaatactttattttaggttttaaatttatttctatatatacaaccaaattgtttgtgaatggtgaattttatttcttttctcctttacatgttttttaaaattaataaacttaatttttaatagcagtttcaggttcacaaaaaatagagtgcaaagtacagagagtttctatacatacatatatgtatgtgtgtgtatatatgtatatatgtgtgtgtatatatgtatatataatgtgtgtatatatatgtatatatatgtgtgtgtgtgtgtatatacatgtatatagcccgtccctccctctcagactcccctattatcaacatctcataacagagtggtagawttgttgcaacagataaacttatgttgacatcattatcaccmagagtttatagtttatattatggttcactgttggtggtgtacattctataggttttgacaaatgtataatgacatctatccaccattgtagtattgcagtatcatacagaatagtttcactaccgtaaaaaaatactctgtattctatgtattcatccctcccccaatccctggcaaccattaatctttttaatatcttcatagttttattttttctagaatgccagatagtttggatattacagtatgcataatagctttatgagattggcttttttcacttaaatgcatttaagtttccttcgcgtcttttcatagcttggtagctcatttattttcagtgcagaataatgtttcattgtctggatgtaccacagtttatttatccactcacctgctgaaagacatcttgattgtttccaggttcgagcaattatgaatgaagctgctataaacatttctgtgtaggtttttgtgtggacataagtttttatttgagaaaaaccaaagaacatgattactagattgtatgattagagaatgttagttttataagaaactgccaaagtgtcctgtactaagttgtgtactattttgcatttccatgaacaatgaatgagcgttcctgctgatccacatcttcaccagcatttggtattatcagtattttctattttgttccttctaataggcatgtagtgatatgtcatttttttaaattcttttaattmaagagtgatatctctaataatatatgatattggacatcttttcatatgtttacttgcatctgtgtatcttctttggtggtgtctgttcaggtcttttaccattttttaattggattgttgttttcttaktgtgttttaagagttatttgtatattttggctaacattcctttatcagatatgtcttttgcaaatatttttttcccagtctgtggcatgttttttcattatcttaacagtgtctttcacagagcagtagcttttaattttaataaagccttgtctatcaattatttctttaatggattgtgcctttagtgttctggctaaaaagttattgctatacctaagatcatctaagttttctcctatgttatctctagaaattttttagttttgtgttttacatttaggtctatgatcaattttgagttaatttttgtgaagagcataagatatatgtctagactcctccttttgcacataaatgtccagttttttcagcatcatttgttcaaaggattatcttttctcctttagattgcctttgctttatgtcaaaaatcagttgaccayatttatgtgagtctgtttatgagcgctctgttctgttccattcaacgattttttttcttttaccagtaccacacagtcctgattattgtagctttatattgagtcttgaagttggatagtgtcagttttctgactttgctgttcttcttcaatagtaagttggctattctgtgtcttttgcctcttcatagaaactttagaatcagtttgttgatatcctcaaaacaatttgctgcaattttgattgggattgcattgaatctatagatcaaatggggaagaatggacatcttgacaatattgagtctttcaatccataaacatggaatatctctaatttatttagttcttccttaatatcttttatcaggattttatagttttcttcatatagatttttacatattttattaaatgtataccaaaatgtttcatttcttagagtgataatatgaatggtaatgtgtttttcatttcaaattccacttggtctttgctaataaataggaaagtggttgacttttgtatattagccttgtattttgcaacctcgctataattacatactggttccaggaatttttgtcaattatgtcttattttstactcagatgatcatgtcatctgtgatcaaagacagtttcattttttcatcccaatctgtataccctttattttattttatttattttatttttaaactgcattagctaggacttccagtatgatgttgaaaaacagtggtaagaggggacatcctccccttgtttctaatcttactgggaaagctttgagtttctcaccattacatgtgatgttagctcaatgttttttatagatgttctttaccaagttgaggacattccctctatttctagcttgctgagagttcttttttaaaccatgaatgggcgttgaattttgtcaaatgtttttctggatcaatatgatcatatgatttatcattgttagcctgttgatgtgtgatgtattccattaattgattttttgagtggtgagccmgcctagcataactgggataaatcccacttgattgtggtatataattcttttaacacattatttgattcaattagctaatattttcttgaggatttttgcatttgtgttcatgagagttactgatgtatggtttttattttcttataatatccttgtctagttttgatattaggataatgctgacctgataaaatgagttaggaaagattccctttgcttctatcttctgaaagaaatgatatagaattggcatcatttattccataatctgggcctgttgcttctgttttggaaggttactaattactgatttaatttctttaatatataaaggactttcagcatgaattttggcagattgtgtcgtttctcttgtgtgaattgttgcagattgtatctttcaaggaattagttcatttcatctaggctatcaagtttgtggctatggagttgttaaaaagatttctaattgtccatgggaactgtaatgatattccctccctcatttctgatattaccaatttgcgtcgtctcttttttttttttcctttagtctggctagaagttcatctattttattggtctttccaaaaactagcttttggttttattggctttcttttttgatttcctgttttcagttctgttgacttcaggtctagttttcattatttcttttcttctcttactttgtactcaatttgctcttctttttctagttttctaaagtggaggctcagcttatcgcttttagattgatgctgtatgcttccctctcagcactgctttcactgcatcccgcacactttgagaagttgtatttttatttcaatttagtacaaaatattttaaattttctcttgagatttcttcattaacacatgtgttatttaaaagtgtgttgtttaatcttcatgtattttgggttattccagctatcattctgttaccgatttctagtttaaaaccattgtggtttgagagcagacatattatttcaattgttttcaacttgttgtgttttatagcccagaatgtggtctgttttggtgactgttccatatgagtttgagaagaatgtgtaaactgctgttggtggatgaagtagtctatagatatcaattacatctagttgattgatggtgttgctgagttcaatgatgttcttactgattttctacctgctgaacttgtccacttctcatagaggggtgttaaaatcttcaactataatagtgaattcatctatttctcctggcagtttttgcctcatatattttgatattctgttattaggtgtatatatagtaaggattgttatgtctttaggagtatgacccctttaacattttgaaatactctttttattcctgataactgtccttgttctgaagtctgctttgtcttattactattgctacttccacttattttgatatgttagcatggtatatctttctccatctcttattttaatctatatttatctttatatgtaaagtggtttcctatagataatatatagttgggtcttattttttttgacccactctgacaatctctgtttttagattggtgtatttagacccctgacatttatgattattggtgtagttggattagtacctacccatatttggtactgttttctatttgtccttgtcgttcatttttatttttgctttccctgccttttttttgccttttgtggttttaatcgagcatttatattattccattttctcttattttgttaagatatcagttatacttcttttaagtggttggcctagagtttacaatattcagttacaattaatccaagtccgctttcaaataactatactgcatcacaaggtgtgcaggtacctcataataacaaaatattctgaattcctctatcccatcccttgtattactgctgtcattccttcacatatacataagcatatacatatgaaaaatgatattcttatgtataactatacatgtatgtaatatatatgaatgtaatatacctgtatatgtaatcaagtacattgatgctattattttgaacaaacttatctctagatcaatcaagaataagaaaatagagttttcttttattaatgctcttcctttttgtatgcacatctgagtttctaaactatataattttccttctccctgaagamcttcaacatctcctggcaacacatttcctcaatttttatttgtctgagaaagtcttcatttctactttacttttgaaggataattttacaggtacaaaatgstaagtgttttttttttcatcactttaaatatttcactccatattcttgtttgcatggtttctgaggagaagtcatatgtaattcttttctttgctcctctataggttaagtgttttccacccacttcctcaaccctggacttctttcaaggtttttcttttattttttattttctgaggtttgaatatgatgtgcctaggtgtatttttttggacatttatcatacttagtgttctttgtgcctcctggatctgtgtggtttggtgtctgacattaatttgagaaaattctcaggaattgttgcttcaaatattgtttctgttcctttctctttttcttttccttctggtattcccattatacatatgatataccatttgtagttgttccacagttattggatattctgggtttttttttccagtcttattttcctttggagatttctgttgatatatcctctagttcacagattcttttcttagtcatatccagtctactagtgagcccagcaaaggcattcttcatttttgtgacagcatttttaatctctagcctttatttttgattatttcttagatttatgtctctctgctcacattatgcacctgtgtctgcatactctctactttttctactaaaattcttagccatattaattatatattttaaaaatttggtccaataattctaaacattcctcataggactgctacatttgactctggctctgatgcttgttcagtttcttttttttttgacacggaattttgctcttgttacctacgctggagtgcaatggtgtgatcttggttcactgcaacctccgcctcctgggttcaatggattctcctacctcagcctcctgaatagctgggattgtaggcatgcaccaccatgcccggctaattttttgtatatttagtagagacaggttttctccatgttagtcaggctggtctcgaactccctacctcaggtgatctgcccgcctaggcctcccaaagtgctgggattacaggtgtgagccaccgtgcccagcctgtccagtttctttaaactgttttttgccttttggtatgtcttataattttttgttkaaaggcagacatgatgtactgggtaaaaggaaccgtaataaataggactttagtcatgtagtggtaacgtgtgagggaagggtaagaattccatagtcctatgattacatctcaggtttttggtgagcctgtgtcttcagactgtgaatttcatgaatgcttctcaataatttccctgcttaggtgggagaggatggctggagtgggctggagttgagtattttccttctcccaagtggaaggcttgagggggttggagytgggtatttcccttaccctaggtaggttatgctgtgataaaacagcaggttaggctctggaaaaatcgtttttcctgaaggcaggacttgttaaaaagaacagaatgttgtggtgtatttaaaaatgcttcttaatctcctccccctgctggaatcacacgggaattttcctctgacactctctgtgaggacctggtagagcttctggaggtaaaactccccaaagtgtggccatccccttttgactgggtatccttggagttcttaactctgagagttgtgcaccctgagcatccagcagttcgtagatcacagttccaaagttcctaccgacactggttcctgtggaggtttctgttcctgggtttctcctctggtaagctgtgattctctgtttttgcctgtctttctctggaatctgaggggcagcaatctgttgggtgacctcacttctctgatgaatctaagaagagctgttgacttttcagtttattcagctatttacttgttaggatgaagtgaagactgctgagttccttatatgctggactggaaacgggaagtctacgatatgttctttttgcttctttttcttatttctctaagatcaccaggataatattgcatagaggagtaatagtagatatttttgttttgttcctgagttcagacgaaagcattcattgttttaccattaataatgatgttttctgaaggtactctcctagtcttacattgctgagagttctttttttttaaaagaaaattacaaatggatactgaatgttataaagtgttttatttgcatcttatataattatgtgattttttatgtttattatgttatattgattggtgtttgaatcttcaagcaacttcgcattcctggaataaaccctcttggtccttttatatattgtcagattatatttgctaatttttttgagaatttttgcatctatgattatgacggagattctggaagttatttttttttcataatgtccctgtcgatatttggctggtcccctaacatgagttggatagtgtttcccaagtttgtactacattggtattatttcctccrtgaatgtttggaacaattcaccagtgtggcaatcaggacctggagtcatctctgtgagagggctttacattatagatccaatatctttatatagcactatttctgttttctattttgatatgtatattttgcaggaagttttctgttttatttaaagtttcaaatttattagcataaycttcatactattctctttatcaatgtctgtaagaatacatatatatggaataatgtctcctttttcattattgatataaataatgtttttgctctttattacttgatcaatcttcctaaaagtttattaatttcattaatcttttcaaagaactatcttttagttttgcttattttgctctgtgagactacagtttctatttcactgatgctctctggtatttccttaattgttcatttttgggcgtttatttctttttccagcttttaagatagagcttaggtaattaatttttaacctttctgcttttgtaatatactaatttaaagttctaataactgcattagcagacataaaaatttgagatgtcagattttcattataactcagtttgaaatattttctaattttcactgtgtttatttttgccccatagattgttttaatcccaatcatttgagggactttctagttatatttctattacagaattctgttttgattccattgtgataaaaggccatacactctatggttttaaaatttgtttagacttgatttatcattcaacatgtgatctatatgagtcattttctatgtgcacttgaacaaaatgtatattttgtaattgttgagtgtaatgtttgatatatgtgaattagttaatgtaagttaatcttattatttaaatattctatatctctgttgatttttctcttattctattgaggcagctatgttaaaatctcaatcatgtggatatatcttatttttctttgtcagctttggtttatgttattggttttatgtaattttaggattgttggaatkttcctgttattattatgtgatacttttctttattgatgcttcttgacttagartattaattatctgatattaatacatctacatcagcttttttggagttagtgtttacatgatataaccccacttatcttgtttactttgaatattttttgtgtttttatagttaaagtttatctgttataaacaacctaattgagatctggttttcattcgctttttactatctttctttaatatgtcatgcttagtccatttatatgtgatataatttctaatgctaggttttaagcttatggtttcctattttcattctgttaaatctccagaagctcttttagccttgatattctattattctaaaaaargsaaggccgtggcttgcaattatgttttataaaatttaatggcactcaaaattctttatcataaggagagcacagtatagatctcttgcatgtaccattcacaataaggttctcagtcctatgagaatcaaacgccactgctgatctcacaggagrcagagctcaggtggtaatgctggtaccagtaaggctggtaccagtccatggcccaggggttggggactcctgctttataaagtttggcttcccctctgcctctaaatgaaagccaaaatattatagaaacttagtggggaaacccctaaactgtcttttaaaaaagtaaatcgtagagaatcattttctgagacaacagccttttaaaaagtaatattctacttctgcttctggccataaagaagtaactggtactggaattaacctcgtaatataaacaatgagaacrcttgatcaactgtatgaaataactgttttaagaaattagacaatagttagcactagactgcagtatatgagagaaggaaaataaagtaagccatgagattagcttggctttctacctggtggcatttatcagatcctggtactgggtctgataaatttatttttggtataatttggtaaatttattactggtacatgtcagataaattggtactggtagaattttgtgctgctacaaagatacccaaaaatgtggaagtgactttggaactggataacaggcagaggttggaacagtttggagtgctcagaagaagataggaagatgtggaaaagtttggaacttcctagagacttgttgaatggctttgaccaaaattctgatagtgatatggacaatgaagtccaggctgaagtgggctcagatggagataaggaacttgttgggaactggagcaaaggtgactcttgttttgcattacaaagagactggcagcactttgtccctgccctagagatttgtggaactttcaacttgagaatgatgctttaagatatctggcagaagaaatttctaagcggccaagtgttcaagaagaggcagagcataaaagtttggaaaatttgcagcctaacgatgtgatagaaaagaaaaacccattttctggggagaaattcaagcctgctgcagaaatttgcataagtaacaaggagtcaattttttttttctttttcttttttttttttgagacagagcctctgttgccgaagctggagtgcagtggtgcgatcttggctcactgcaacctctgcctagtgggttcaagtgattttcctgcctcagcttcccgagtagctgggactacaggcatgtgccaccatgcccagctaattttctttttgtatttttagtagagatggggtttcaccgtgttagccrggattgtctcaatctcctgacctcataatctgccttccttgggctcccaaagtgctgggattacaggcatgagccaccgtgcccagctggagccaagtgttagtcactaagacaatggggaaaatgtctccagagcatgtcagagaccttcacagcagcccctcccattacaggccaaaaggcctaggagggaaaaatggttctgtgggccaggcccaaggcccccctgcactgtgtagctttgggatatgatgccttgcattccagmtgcttcagctcctgctgtggctacaaggggcaaaagtacagctcaggctgttgcttcagagggtgcaaggcccaagccttggcaactttcacgaggggtaggatctgagggtgcacagtagtcaagaattgaggttttggaacctttgcctagatttcagaggatgtatggaaacaccaggatgtccaggtagaagtttgctgcagaggtggagctgtcatggagaacctctgatagggcagtgtggaaggaaaatgtgggattggaaccyctacacagagtccccactggggcactgcctagtagagctgtgagaagagggccaccattctccagacccaaaatggtagatccaccgacagcttgcactgtgtgcctggtaaagccacagacactcaatgccagccactgaaagcagccaggggttgggctttaccttgcaaagccacagaggcagagttgtccaaggccatggaagcccaccttttgtatctgcatgacctggatgtgagacatggagtcaaaggaggtcattttggaactttaaggtttaatgactgccttattggatttcagacttgcgtggggcctgtaacccctttgttttggccaatttctcccatttggaatgggtgtatttacccaatgtctgtacccctattttatctaggaagtaactaacttgcttttgattttacaggctcataggcagaagggtcttgccttgtctcagatgagattttggacttagacttttgagttaatggtgaaatgagttaagactttggggactgtgggaagggcattgttgtgttttgaaatgtgaggacatgaaatttgggagggaccaggggcaaaatgatatggtttggctgtttccccacccaaatctcatcttgaattgtagttcttatagtccccatgtgtcatggaagggacctggtgggaggtaattgtaggtggtttaccccatgctattcttgtgacagtaagttctcataagatctgatggttttataaggggcttcccactttactcagttctcattcttctccttcctatcaccatgtgaagatggacatgtttgctttcccttctgccatgattgtaaatttcctgaggcctccccagccctgcagaactgtgagtcaattaaagctgttttctttataaattacccagtctcgggcagttctttacagcagcatgagaatggactaatacagaaaggaaatcagtatattgagatgtctgcatttccatatttattgcagcactactcacaatagccaaatacggagtcaacctaagtgtctatcaacagatgaatggatataaaatgtggtacatggcacatatacacaataaatattattcagcgataaaaaggaataaaatcttgttgtttacaacaacatggattcaacaaaaggatattacgttaagaaaaataagccagtcacagaaagatatttgtgacatattctcactcatatgtgagagcttaaaaaacaaatgaactcacggacatagatagtagaatgatgattaccagtagctgggaaggataatggggagcaggggataaaatggggatagttgatgggtacaaaaatatatataatgaaaaagagctagtatttggtatcacaggagggtttctatagttaatgataatttgcyatgtatttaaaaataactagaagaatagaactggaatgtttctaacacaaagaaatggcaaatacttaaggtgatggatacccaagttaccttgatttgatatttacacattgcatgcttgtatcaaaacatcacatgtacctgtaaatatatacaactattatgtgcccataataatgaaaaattaaaaataaataaatttgttaaaaaatataatcccttagatccaagaagtataaacacagggaagaatgtataccaaagcacatcaaaatcaaatggctggaaacaaatgaaagagagtcttagaagtagccaaagatatgttatatacagtggagcaaagatagaaatgattcctcacatcagaaacaattcagttagatatcacaatgacatactttgaggtcctaaaaaaattgcaacctacaattttataattagaaaaaatattcacatctgaaggtgaaataaagacattaaagaaaaataaaagttcagacaatttattgctagcagattttaattttaaaaattttaaaaaacttcttcaggctgaagaaaataatactagatggaaacttagattttaaaaagtaatgaaggttactgtaaatggttactctggaggcaaatatatgacatttaatttctaatgattaatttacttaaaatatgattgattctatagaataaacaataaccatgtataatgaggtttaaaacatatggaactaatacctatgacagcaataatacaaaataaaggtgttttaaagttccttacattgtatttgaaatggtatattattgaaggtagactgttgtaagttaaagatgcatataataaaccctggatcaatcatttaaataatgaaataaagaggtatagttaataaaccaacaaaggagataagtagaattctaaaaaaaataataattaaaaagccaagaaaagaggaacaaaggaacaaaggacaaattaaaaatagcaagatggtagacttaacagttattacattaaatctaaatggactaattatactaatttttaaaaggcagagattatcagattggattaacaaaaaacaagacccaattaatatgctaactacaagagacataataaatataaagatgtaaatatgttaaaagttttttgaagatgtaccatgaaaacactaatgataagaaggcttaaaaggctatattaatataaaagtagactccaggagaaggaatattatcagagataaagaaggacatttcataatgattaaaggttcaattaaccaagaagacataatatttctgcatatatacatgtattaataataacagagctttaaaatacatgaagcaaaataatgacagaactaaaagaagaaaaagacacagccacaatctaattattcttggtgattttaacacacctcttttagaatatgataaaacaagtagacagaaaaatctgtaagactgtagaagacctgaacaaaattatcaacttaacctaactgatgttgctagaacactacactaaaaaacatctggataattattattttcaagggaataaggaacatccccaagataaggcacatgctggactataaaacaaatctcaaatgtaaaatgaatgaaactataatgggtatattttctgacatggaaatgaagtacaaatcaataacaatatgaaacatttttaaattcaaattatttggcaattaaaccacatatttctaaataaaccayttaccaaagaagaaagaacaaggaaaattgtaaagtattttaaactaaatgataatgaaaacccaacctaacgaaatgtgtgggatgcagctaaagtaatacttagaaggaaatttatatctttaaatgctaatattaaatatagtcttaaaaattgcctgtaaattcaagacaaattcaatcagaattccagaaagtcttttcttttttggtaggcaaaccaattctaaaatttatctgaaaatgcaaaggacctagcgtagccaaaacaaatttgaaatagaagaacaaattcttattccacgtgatttcaaaacttattataaggctgcaacaatgaagacagtttggtattatagtgaggataatgaattgattaatagaacagaaaagaattaagaaatagatctacaaacacacacacaaacacacacacacatacacactctatacacagtcatttgattttcaacagttaagacaagataactcattgggaaaaagataatctttttgaaaaatgttgctggaacaactggatatttatatgaaagaaaactgactttatcttttacctcatgccatacatacaaaataaattaaaattgatcatagacctaaatataaaactaaactctaaagtttctagaagaaaacataggaaaaaaatctttgtgatattgaaaagacaaaaatttcatagagagaatccagaaaatactagtcattaaaaaattgataatcaaatcacattaaagtgaaaactctagctcctcaaaagacaccttgtgaaaacaaaaaggcatgctgtagactaggtaaaaatgtttacattacatatatttgagagacgacttcacaacccagtgtaaaaatgggcaaaatatatatgaatggtcaaaaagcatatgaaaatatgctcaatatcttagtcattaaggaaatacaaataaaactacattaaaataccacttcttatcctctgggtgacaaaattaaagtgctaacactaagacatattgttgaggatatgaaacaactagaacactcatacgttgttggtagaagtataaaatggtgcaaccactttggaaaaccttttggcagtttataaaaataaagtcaggcacatagctccccaattttacaggaaattcaatttttaagggggaaaaatagatatatattcataaaaagacttgtgaatgaatttgtatattagttttatttctaatacatctaaactgaaaacaacccacatgtccatagacagatgaatagatacacattatacacacattatgtggtgtgttcataaaatggaaattaataaaaaggaccagactactaattcatgctacaacaggaatgaatctcaagaactttatgctgagtgaatgaatccatatccaaaaaagaatatattgtatactttcatttttatgaaattcaagaataggcaaaattattttatagtgatagaaatcatatcagtggttgcctgagtccaggagcatggatgattgcctggaaagggagcataagataactttttagaaatgttctgtatcttctttcgggggggtggagctacatgagtatataatttgtcaaaacttattaaatttatattttaaatgggcgcattttattatatgtaaattatatatgaatatagttaattaaaaaaactagttttatagctgcttgacacacaatagtcttgatctttttatgtatatcaaggaattagttttagcacttattatgtgcagagctctgggttaagcattatggaaaaacacaaagtggtatcagaaacattccctgaccatcaagaaacttaatatgtagttatcatattgtggtataaacttgatcacataattaatcagatggtggtaaaaattgataagtactagtggtggtagatgtaaaaggagtcatgaaatttagagttaaattagttgattaatacatgagaagaatataaaaaatacagtgcctgacagatatgtgctcagcaagygttaattattttccttgaggggacgagaatttatgtttgaagtgatgaatcaaggcataattgaggagttggcatttgatgtaggcacagtagaataggagggtttttcgtaagtcaaaaagtggggagacattcaggtcaggaggatgtggtgatcaaagaggggaagtgaaaaagcacaggtatgtacagtggagataggcatgcttggtgtactcatttggacaaaaagaagagtttcaagtaaatagaataataggaacttaatcagcagggtcaaactataaagggtccttaaaaccaaattgaggactataaccttgttttaaattgatcttttgtggattgccaatatataaagtaaaatagataaaaatggatattttatcagtaaaaacattttataatttaatattatgacattaactataaagtcaattaatcagaacagtgaagctgttttgaacacgtaactttgaaattagggactgctgatctcagaggaaaggttttttttttgtttttttttaatgagcctcagttttcacttaatttctggtgtgttttcttttggttgcatcatgttgagaaagtcctaatttatatagacaagttattgtaagtagcaatgctttaaacatttaccttaaggtctttgtatatctttcaatgaagcaagaagtttgtttcaaagcacagtcacatgtcgcttcacaatgaggatacattcagagaaatgcatccttaggcaatttcattgtcatgcaaacatcatagagggtacttacacaaacctacatggtatggcctagtacacacctaggctatatagtataacctattgatcttaggctacaaacctgtgcagcatgttactgtactaaacactgtaggcagttgtaatacaatgataaataattgtggatctaaacatagaaaagttacagtaaatatatgacattatactcttatgcaagactaccattgtatgtggagtttgtctttatgcagctcatgactgtatacataataaatatttcaatgtggtagtacaagttaactctttggtggtttccagatggttaaaatttagaatatagcacattcgtgtatgtatgacacttttggttatggttttcataatgtttagatttttttaagttgcaacttgcagaaacccaactcaaattaataggaatgtattggcttacattaccaaaagcccaggaataaaattctgttttatctattttgggatgtaagtatgctaacatgaggtaaagatttttttctgtatcyattcttactgctgctccttctgcttttctttctatttttggcttcattcactcttaytgcaggcaggctctatctatgtgccaggtgggatggtcatgactgtccacatgcatatagcttccaacctgagcatgagagagcctttagatagttccagcaagtaattctgattggattgaatttgtctttgtgtggcaagggggagcagtagaaggcaagcaacayagaactatgattgaccactctcatcaagacaacagcagtcagaaatattttcccaaagaaaccaaaataaagaatataggacacactggatacagaaattattatctccacagaaattagaatacagttttaaaaaagtgaagtatgtattttaaaaagtaaaaataaaacaaatagttgtagaacccaaaaagcaggagcagaaaataggggatagagaagatgtcacgatgagtaatattttagcaacatggacagccatagtttctaatggaatgtttttattccattaaaattgtggcacatctgaagrcctcctgggcaataagatacagtgaaaaaccaaggcttcagcctgcacatgtacttctgatagatgaaaataaaacttaccttggaaggaattaccttatgagttcaacagtaattttaggaaactgttacctattcattagtggatggtattcagaaaaggagagcttttaattcaaacaaaataaagcattatggaaaaagaattgtggaggaaaggaaaaccagcataagtgagtgtgcataggagaactggcagttgaccactattggttttcattgcaatatgcaggattttttgcacccctctccaaagaattagagtgtcttacttcatatctgaagcaaataattagtaatttttttatttttcacttttggatactacattgtggggacaatcaaacctatgttcaaataatgatttaaatagtcatgtcagcaaaacaagcactgcactgtagttagggctctgtcaccaacattttgacattggcaagacaggtgacttccttatcttgactctgttttctcatttctgaaatgagggtattggtctttatgatcattgaagtcttttttagttatagcagcaggccataggtttctgaatcatccgctgtatgtttccctctttttctagattggcattgataacagttgtgctttgaaggaaatttcagaagttgcttttgaacaatttctgttattgttataggtgttaggcagccttggaaagcagataaaagagataactcttacctgcacctatagaacaatgtgactttcattgacgtatgttaagtactggttttaaggaatgcctatgaaaaaaatatctaagaatttggcagataaaaattgtgtatagagagaatattgtaccgattatgatgatgtctgtatgtgtatgtacaggtttcaaatgtggtatggagctttttcttccttatgagcattccaaaatcttgcatctaacagttctaattacatttccaatagcttccactgccacacacacacacacacacacacacacacacacacacacactatattatctagtaaagtggttttggaattaacatttttcctggaaggaatatatctgatttaatgaccaaatcgttttaaggcagcacaacagaatttcacaggaactaaatctattttttcacaccgatcatgcatgttttactcaagcattgagtcattagcatgtttataatggttctaatttagcacaacattttctgaattttatccttgagtcatttacaaattgttcatattgagtaaacaaaggaaacagattgcattttatacttagtaatttatctgaaagaagaggggagggttaattgttttaaagttttggtctgtttggggaagtgagcctgctttttcattgctaggcataaatgccatttctcatctttttggtaatgggggaggggtgttatggaggagtaaaatgaaaaattaggaccaggacaagattggccactcccagaggggagtgtggagcaaaaggggagctggcacgagattatccaaaacagttggtgcattccttaatgatcaagtgcttgagaagtccagctcctcctggcagagcatctgtgttgatgtttatatcattgccctgctrtatgggaaaggcatgctttctcttgctgcttggctaaaaataggacggaatatagtattgtatgagatattttaagatagcaaaaacatttaagaggttaaaggtttgacttttggatcaaaaaagatcagtaatataactcatggtgttacttgcagactggattttatctagagtttgttagtgattcgtactcttggttagggaagttattctaggtttatttggtgtagtctgaaaaacccactccgctgtctttctgtcagcttcccagcgtgaagagcaggcctgaaaacagcctctatttatactcccttgttcttatttggaaaatcagttgtttcattggagagagagggagasggggagagagagagaagagcatgagcagtcgtcagggagtgtgctttgtacgttatagtgacttcaaaataaaactggcacattttagtgtctaattatttttagtgagcttggagggttttaattaaaatttaagagtgctcttcaagctctccaagttccaattttatcccactgtattgtggagcacttgccactgtggaaaaatgtacagtaactggcatgtgcaactctgtgtttcctaatgaaaaatgtgagatggataatcagtggggatataaatatattttgctggatttaattgtaaaccaaggtcatggatacttttgataagttatcattgttcttgggtaaatagaaaaatttattacatttgaaatttatgattcctatggtaaaaataaaaggaattgctttactattttctcaaagtgttaataagcaacagaaaatctgcacatagagccagcagtaattgttctcctcactaaaatattttgaagatattttttatgttgtttctagtgttttagcatttctaagtttaaatatcacgaggtaaagggaaaataagtgtttgcttataggtagattgttgtaaagtgcaataaagatttgtcacattatctcttcctcttccccatgctgtaagtttaatgacaatttgtttatttatttttgatctatctgaaatacctttattttgtacagtgtgggagttaatactgctgcaggtttgtctgactagaagtaatttaaaattgttcccaaaatatcaccacacagattaggaaatcaatatctcacatactctttcttttcatttttcttacatcataaaattaattactaagttaattagcgaaaacattactcagctgtgataaagcattcttgacttacctggcccgaaacctaagtacttaggaagcagaaacattgctttgtaatttattatgcatgatattttaaaaacaaaatagttctgaattctatcttccttttctctcaaatttcttgaaagagaaaagctttaatttgaaaagggaaagaaaaaaccagaaacaatgcaactgataatttataatacatcaaaacgtttacatccttgcttaaattataggtgagaactgaagtccagctcgcgatttttgatagtactcttttaatcattattatttataaaaattagagaagataaagtcctgcatttcattgaataaatattggttaatkgaamcagattctttcaaagtaagaggaattaattttggcattttctatttcaatacgactttagcataatgctactttagcattatgacttacgttcattttttaaaaatatgtacatattatggtgacatttttcatgctgtaatgttgtgattctttatttccatttccaaaaagcatatattttctctcctgtttttcagatgatgacaacttaaaracattaaacttggaaaagtcaaagtcagataataaatttactgcatattgtttaattgttttgaggatggtggcagcattgtaactaattagttaattgttttcaaattaatttgtaaaatatatttatgtttataaaataatccaagagtgtcttggggctgttcagtcctttttttccatttggaatcttacatgattactgtgttaaagccactcagtgtgatcttattctttccatgtacataatgcaaacaggccttctttgcttatttttaccactttgatttttgcatttatgcttgatcagaataggtcaaagtctgatctgatcaattgcctctgtaatactaatgtcccattaatgtagttgaggaatgtggcacaaagggaatggatccttacttttaatttgtacccatacctggatattgttttgagatagaaatttgaaaacataaattttatttgtaactttgtatcaattacatattttctcatttcaaatcaggaaccttttggtggtagcagtagtgtcttctgcttatagagtgcttagtaacaattcacttctgagaaaaaatatcatcctacttactttatattattacgtggagaatgcttagcaccaattgtggtatgcctctagaggtttggcagtcagataatggggtagaaagcagtcatttgtcaagagactttcttacaggttcgagtcttcctggaatctcctagtcctgagattaaacattgataagcttgtatgtactaactttcattgtcctatagataaaggcaatcagtggttgctattaaatattttcatggctgaaaatgtagatatgcaaaggctgctttattttttccctcaatttcttctactgaaatgggaactcatatagctagattaactgagcattgcagtaaggattaattttctaataggaatgcgaaacgctttgaagttattagccattttattaatgagtagcttttatataaagctgtgtccacatggtttaagtgtgtattcctgttgttcatatagctctctttttctcccatgaagttttagcattcttttcttggagctctaaaagatttcaggtctatttatagaaatgagagacatattttagcctgttttacatcctaamatgcatttaatcctagtatatggacttgctctgaatttgttattattacaaataaattgggcttttatctttgactactatactatatgctctcaactcaaactttagctaaaaaagttatgcttttgtaattgtatcagtaattattagcttagtgcactgatataacatatgaaaggctaaaaaaaacagaattgggtaggatattaaaataaaaactttttgttgactattcttatccatactctaacgttatatcaatctctttcagaaattcaaacctgatttgagaaaaagcaatctgtgacaggcatggatttgaagaattgcttcctaactcttaacttagtattatcatttttatgactttagcataaaaacaaaataagtatagaacaaaatatatatctcatttctgaatttgaataaaaaatagtaagaggctatttaagcaattaaatgcaacccgaacatatgcatctgcatgtaggctccattggaacatcactcagaatccaattttgaarcacagtagtagatcatttgttgaagactgagaaaataataggaaataatggaataaagaaagaaggaaggtaggaaggaaggaaaacgggagggaagaagtaagggaatgggcaaggagctttcatttaataaaatcaagctgacttctatttagaaagaacttcagctctgtgatagccagttcggatggttgttcttcatcagccgtttttacaacacactgatctggattctatcccttccttgattgattgatagtgtcacagacaaatgttaattgttttttcaccaatactttctaaccatgcagtggtcttctcatctcttagccagggctcatggtctttttctgaagcttatctagcttctaaagccctttagatccatcttgaccttactgtcattctgaaaaattcaaggaggatttagaagctggagaaaataaaaaatgaaagggaaaatactaaagagataggtgctgatacgagagagaaaaggcatttagaattggagtaactgttttaaatataattttaaaaggaagttatcagaattttgacacttggaatgttaaagttttatgggagtatgctttgcactaaggatttagtatttaaatctgcattcccttttggaaacatgacctatttgttaagatttgaggcttaaaagatacaaataaatagtggtaagcagtagcrccagttgcaaatccatttgcatagagagcagaaataactcattgagaaaaatttggtaattatcaagacattctaaagtttggatttctgtagtctttatgaatcttgataaaaacaagtgtaattactccctgtattttagtatgctatttagaaatacagtggggcaaataataaatggcatttatataggtatttatttaataaaaatatgtatcagtttttacataagagaaaaattttagcagttttattactaggggtcagagaacatcttaatttcattttcttcttgttttgctttaattggatattttataaaagttagatttcttttttaagaactaagtggttacagattgattgggctcttctctcttgattatctgttattgtttcttgcacagcacatacattttgcttggacttaaaaaatattgcctggattaaaaggagtatctaatgttaaactaataggaaagagccctcttttctgtactatcagtctaagaaatgacaaatgctgattgaatattaatagaattataatactaaaacagattattgagcattatcttttttctcttagatgatagtttaaataattatctggtaaaaataaactttgtggtggtattttataatacacattatagaataatgtaattttctatatcctggggttcaagctacagcaacaaaaacagctttatgcattcttaaatgagaatttccccataaactgactttctaaatttgtaataaatatatatttttaatacttacttttgtattttaatagattcctcctgcatggaaaaactactttcaaaagattggaaggaaaaaatggaaagactaaataccagtgaacttcttggagaaattaaaggtacaacataaaatatatcgaacatgtcaatgcagtgatgtgatgttattttgtataacaatgtatttgctgatcttctgtactgtaacagtaaatcttacatgtaacatttgattgtacatgagagggtgaatattataggtttctgagcttttattccttgcaatgtttacaaactgaaaaatttccccactttttgtattagtctataaacatataacttataggatatgctgcctcattaatttacttcacaaaaaagtataaaaaccttatgttaaaagatgagcaaattaagctaaagatagtcttagttttccctcttaaaattataataatagcttaatttatgaatccaaattattttgaatttcttctaatcaaaatgggttgcctgtagcacctttaaaaatgtttatagaatgtgctgtacataatggtttattgggggattctgaagcttgtttacgttggttcaaatcctggctctgtcactggacagagtaactttggacaagccactgaagttttctttttttctttttctttcttttcttttcttttttttttttttttgagatgcagtctcactctgttgccaggctggagtgcagtggcgtgatctcagctcactgcaacctctgcctcccaggttcaagcgattctcctgcctcagcccyctgagtagctgggcctataggcgtgcaccaccacgcccagttaatttttgtatttttagtggagaggggtttcaccaggctgaccaggatgttcttgatctcttgacctcgtgatctgcctgtcttggcctcccaaattgctaggattacaggtgtgagtcaccgcaccgggcctgttttatgttttataatcctcatctataaaatgaggataatacaagtatttccttcataggctcattaagaagttaatacatgtatagttcttagaacagtacctggcacttaagaaagtactcatgagtttaagtttggtggttattattaatatacacagacgatcccatgttgataaagctcaaatttcatcaggtttagcattttgtggtctctgactcagatgagaataaacatctttacttttgaatatacgtgattgatattattatttttagacatgttaagaagtggactatcccaatccattcagatagtaagttaccttatcagttgagagttatactttttgcctactaaccaaactcttgctgattcatttatggagaagaagtgctgtattattattatttttgcattatgaatgaaattcatgatcacgcatcaactytgtcaatccttacggacagtcatcactgtgatttgcactaacaatttgggtacttagttacattagttttctgaatttatccaacaactttaggtgaatcttcctattggtcatggataatatctgagttaagatgaaaatttgataataattatctaatgtaaatgttattttgaatttactacagaaaatttcctagttttcaggcatgtcatgttcaattcaagtgaagagaaaaggaagtcatcttttttcccagcaaataattaataaatcattgcattaactaattatgtatcgaaaccagtggaaattggatattattttgagttcccctacttctgttttgtacccataaaggccatttgctgtcttggaaaaaaaaagaaactcaacttattgatggatacaaagaaagtcattagtgacatattctctatccagctgcaataacatggtgtttgctactttgcacgtcattctgtgttttcttccctttccaaagtcattcctttttataacagtgagaacagaaatggtttgtacaaaggcaagctttttccagcatgaaagatgagggtcctgctttctcttagtaatgtgaaaactaacattttattatgttataattcaacatggagtttttgtacttcagggtatattttctccccccctttccgtctttctttatatttaagtctaattttgaattcaaaatttaaaaaatgtgctagtcttggatacttggaatgtataaatcacaaaagtgaatcacatgaaaaattagccttttcaaattctttaacctttttttctggattctttgtgatatgtgaactttcatttgtgtgttattctgagtttcttatgggcataaaatataagattcttactaaatttatctttatttattctccattatcatctcttcatacatcctaatatcttttacagaaaatgtaccaagaatatattaatttaaaaatgaaaaaatcagttaaaatagtattgaaatagtttgagtaaactgctaccaaaactcaacatacatttttattctggtggaaaccaggccagttattatccacctaaattacttctcattttcctgaaattttaaggtgacctaaattatatctttgaggaatacatacaatcatgggttatcagtatttaatattatatctcaagcattgtgtatttttgatagctcttatatttttctgattataaaattcatatgtatttatytgtaagaaacatacaaaaaaacaaaaaggtagtgaaattatcttttaattctacttgtatcttattgtatattctttccattttaaattatgcatacttatgttaattttccccacaaaattagaatcatcccattataatttttttgtaatctattttccccacttaatgatatattatgaattttcctgagattgagttatcttctaaaatattatttttgttggcagaaagtattgcataaaatgaggttttcataatgtaactgggccttttcttcaacatttaagttgtttttattgtttgttggtttaaagagcacctattttgaaaacagaaaacatttttattaagacttatcaacttattagtggttatttargttatattcttgaaagtgaaattcctgggccaaagagtttgttctttttaaaaagacttttgattcatattgccagttacccttcaggaagagtgtagtattttgtgctctcaccagtaatatctgcaggtttttattctcttgccctgaataacaagtattattaatttaaaaatttcttgccatttttataggggaaaaaacrtatcattgttgatttaatgagttttttgactattagtgagaatgaggtgttatatctacattaatttgcaattaaatatctcttcctttgtgaactgcatatgtatgttggttgcccattttttctttaaaagacttgtccagttctcagtgttttctaagaactcttaatatatgtttgaatagtattaaactttatttgtgatatatgttgcattttgtcatttgctttattttctggttttgctgtcaatctttccatcccttctttaatgcttttttctatagggggtttgtttagaaaggcttcttcatcctgaaattgaacaatattctgctatattttcatccaattagttggctatatttttaaacacttacctatataatacatcttaaatatgttttgatgaataatgtcaactagaaatataacttaattttattctcaagcagttaaccaaatatctatactgtttattaaataatccatcttacctcctctgacttgaaatggcatcttttattacactctgattacatatttggaaccatttatcagattttggttctattccattgatttttccatctaaacttttattagtactatgctatattaatcactgtaactttagtatccttcaaaagtaagtattgcaagactacactcataatttttctttaaggtgcttccatacttctttaaagtttatctttaatttattttatcaagttgttaattaaaattccaaagtgattttttaaaagattatattacatttatatgaaagggtaggatgaactgacatctttatactattgaattgctccattcaaagtcatttattcagttattttatgtctctcaataattctgcacatttgcacatttcctttgatgttttcttagtatttaatatttttgcttactcttgtgaatgagatatttttcattctattttccttttgttatatttagggatgctattgaattttgctggttaattttgtaacttgcctctattgacttttaggtgtagtcatatttcaatagatatgttttctcttcctttttggtagttatatgtctctttgctacccactcccacccacccttcatacgttcattgccttgaatgccaagaataatattaagtaatagagaagtaatacagatatttcagtgtaatttttaatttatggaattgtttttaatatttcatattaaatattctattgacttgattaaaatatcctttttcatttaaagatattgttctagtctactaggagtttggtctattaaaataacttgcattttatttcatggaatatcttattaggttttgtttttcaaatttgtcattgaaataaaccctgattagtcgtggtatagtcttgtttaaatgtactgcatcattttatttgctcatattatagttgttatagttatttttacaactgtaattataaattgattagagttttccatgtttatattacttttgttaattttttagtagcagtgttcatagttgaattgaaaaacttttcctctttttcttggttatgtaaaatgttgaataaataacatgaactacttattccttgaaattctgaaaaatattctcataaaacatctaggcctagaattttctttggagatttctttttaacattttctacttttcttttaagtcagttttgccataaaatagttttcctaawtaatttttaaagagaagaaaactcttacagaattgtatatctcatgagattttcaaatctcattgacttcatatacatattttatttttagttcttccatttatttgctgttatagatcccatatttaattttgcatatttgttttctcttttttgttcttcaattttacttgctagtggtttttctatttattgctctacctcccccaataatccagtttttggatttgtcaattctgctgcttttcaatatgcctattaattcattttgcttttacccttattatctctcctttcctgttattcttatgctttttcttttgtttgttttttggtatcttttaacttgaatacttcacttaacaaatttttatttaatgataatggtacttttggctatgaatatatttctagaaatagctttattcatcccataagtttgtgcttttagaactctgtcattattttctaaatattcaacatttatattattttctagctgatctgtgtttatatatcattcttaactgcacatattctcttagagtcctagagtgtaatgaagctgggaaagggagagaactcagcctttatcactgccattggaaaattctatgtgatgggtaggtgctaggagagtcaagtgtgagcagtagaatggataagggcaatgattcttcaactcagggagcttaatatttttacatatttaagaaataatagattattattttcccttttagattttacttaaaaaaccagtggtttctcataaaattttatatctgattaacgtaaagcaatgtttctaaaactccttgataggagttggaagactgctaaaatctgagaaacactgaatcatagaaatttgtatgagtatgtacctgagtcatgcctaatattctttttttattgtctatatgtaaggtggacagcatgaagttttgatatacatacatacagtgaaatgattactagtcaagcaaattaacatatgcatcacctcacatagttaccttgttctgtgtgtgtggtaaaagcacctaaaatatactctcctagcaratttacagcatgcagcacaatattatcaacttcagtttttatgttgtagagtagagctatagacttattcatcctacatacctgcaactttgtaccctttgacctacatctccctattcctctctctctcctacccctgttaaccaccattcataatattcttaaatagaaaatctctccttaactccctaccattttttcatatgtagcctcctttctagcattactgaggatagaatgctataattggcataaatttaatagtagtcatctaaaatcaggattcaaaccaagttaatattattacaattattacaaaataactttattattaaaactttaaatgaaatacagaataaaatgtttacacttttactttggcctgggtgcatctgaagtgttgtgtcccagttggggtctcattttttttttttcttttgagatggggtcttgttctgtcgcctaggcaggagtgcattggtgcagtctcggctcactgcaacctctgcctcccgggttcaagygattctcctgccttagcctcctgagtagctgggattacaggcatgtgccaccacgcctggctagtttttgtatttttagtagagacagggtttcaccatgttggtgagactggacttgaactcatgacctcagctgatccgcctgccttggcctcccaaagtgctggaattacaggcatgagccactgcacccggcctgggtctcatatttttaagagatctattgttacattagtatttatcagaatgactagaatagtaaagagttctgaacatttagtgtgaatagtaattaaagacctagggaagtttggcctaatacatattatttgacttgaagttttattggatagaagaggataatatgtgttttctgctgttttagggggttaaggtaatagggaacttgttcttaataaaaaatggaaattaagaacttatagctgtgacattgataagattggactgcattagtagagagtgcctcaagtataagtagatgttcaataaatatttgttgaatgagttgggcctggtgaggcgcacctttagtcccagttactcagaaggtcaaggcaggaagatcgcttgaccccaggaggttgagactgtgattgcaccactacattccagtctgggtaacagagtgagaccctgtcttgaaaaaaaaaacattaaaaattcagaaataataaatatttgttgaacgaatgaatcaatgaattaaaggatgaattaataaaataaatgaaaattgggttctgraaaattttaagcagagatgttgtacagggtatccccatgctggtggaatgttatcttcatgatctcctaaggttcctttcaaattaatactacagttattatactttcttaattagaagactgactttcaaaatatgttctgtttcctgtcaataaataatttggtaagtaacttttgtaagacatcttattgtttacaaagtaaacatctaacattattttatttgagacatataacaatccagtgtggaaaatattattatactgattttatatatgagtaaaatgagactgagggaattaggtatcttgttcagggtcgctcagaaagttgtgaaagtagggtttgaatcttggtctctgaatactctgcttaatacaatacaaagtagttattctttaaagactttgaattctgcagtgggagcaagaaaaagatagattatgggctgttcctccctcccgcaacccacaaacaactaaaataactccacttttacccttttctatgtaaattaggcagtatggcaaaccaggagtgatatagataatacagttctccatgtagtagtatttatcttgatctttacctgaatgagagacaggggtgaagaaatatggtggaaggatacagggtaagacagaactactggtagggcccataacccatctgtatctatgtttgagttatactaaaggaatgaagatgccatagttatttatgagatatttctaaatgcaatggtgacatactacatgatgtctagagcatgaggattcattctctgtctccctgagtgggtctaaccttcatggctgagatcatcttagtcagcctgcctgttttgcacacatgctcctctgtgctgtgtctggcatttcctccttagtgtgaaggtgcctccctgggcaatgtgccagggacacagtaatgttggttgtttgagttagcacaaactgtttgtgcttgtgtttgacaaacacacagaagataagagagaaaaaaaaaacacaattatgtgatagcaaccaaataaggaaaatcgtgttttctttccttggtcatttacgattaattatttcaatatttacatttagggatcaaggtagatgttcttgtaggtatactcttctttagcttagaaaaataacagtctcttctgacagaaaaaaaaattgactaaacagatactttttgatggaaaattctacaaatgattcccaatgtttttcaaaggcactgttgaaaactgttacttattacagttactcaactaatatgtctgaaaagtttggttatagaacctaaatactatcattatagttcactgttaaagactggaagcattactccctgttactttattagggttttactaaaagaagtaaaattaggarctgcatacatcaaatagtacaagcatattatggttgggtttggtgcaaatactgaattaaaatgcaaatttattacaacactgctactaagtgccactgagggcctggtttcatttttagttttgattgcaagcataaatcttcggaggagtgcacagaaacacaaaagtcatggtttttttcactgcatgatagatctttgaagatcaaatagtgtaggttattcttgaagtaacttaagcagtgctgttatcaccaaagggtcaggatggatctaacagcattcccatagaattagtgttctgcaacacaggttactatcttaaaatccagttctctctcctagtttgttcatttctatcataaggccctaaagtatatgtaagtactttgattgcttattccatgcattgccttttctacagaatactctgtttttttttttttttgaatagcaattcatagttactacttttttctgttttaggcaatcacagaaggactagagtggttttacaagagctatggctgtaaactttgcatatttgcttatgaatgaatttttattgaatttctacttacaaatttacagcaattgttatatctggtggaacttaaaaaaaactagaaatgcttagagattaatcatctgccacttttcaactctgataaaatttttaatagcaaagttcacatacctagggatttttgctgtctctttagaaaaaagtatcaaaacagtaactatcaatgttcagattttatagattttttaaaatataaattgttatttctataataattaaacaaatgctatattgatctagagactgacttgtaaaaaagattgacacaacagatgtttttccttttccagttttaatgaaataatgtttgccagtattttctgtgtatgtctgtgtaattgtagaacttcagagtaatatctagaatcatagaatctccaaaagttagagctggaggtgctttgtgttttgtgtaatccaacttcttacttttcatataaggatctcaatatccagaagagaaaagtcactgctctaaatcatatagtaaattactaaggtggaaacttaatattcccccaaaatagcatgtttagtccattttacatagtctcttgattgttttgttatcaatagtgagtaattattgcagaacccatggactctttttgctaacaacaaatgcatacagcagctagttttataaatatgtatatacattatacagcaacacccatagttttttttaattataccactttgcatgaatgtagacatttcaaagctctcctttgtactctctgttatcaacatcttttacttcttttgaagtctgtgtgatatacataaaagcaattaaaacctccccccacttggggttagagacacaaggtcttcttaattaaaactcaaacaaaagctactggaaagaattcctaccatatgattaaggtctaaagtattatgatacattagaatcattgttaactgttgggattaaaagaaatcaatatgttggggaaaagatcagttgaatctaattagtgaaatcaatgtttatgtaaaagaaaacactgaagtttaataacaggttctgattataaatataatactggctaaaattgttctttgttattgttacattgaccacataatcatattttatattcactgaaaaagaatctgaaacttattgtttgtagttaattattataattaaaagtgtaaaactaaaaatcatacctggtttcaaaawtttcaattataaaatgttcttatatgtgaaaatagtcaccaattataaaatatttctattgattttgtttttaaaaggctaattttaggaatagctacagcctagagtagggaaaggaggcaaaattggtttaaagtaaaatgatccaaagtattcttacacaattatgattatattaaatatgtattagtctatttggtgacatattgaaacaaaaaaggatatgttttgatataatacaaatacaagacattttacttttttcttccaattgctatgatgaaaataaacatagctaacatggagaagaaaaactattactaattgaagcctagattttaagtaaaatgaaggtcattagcaatttcctggaagccattcagattgcttaccaggaaatggtggctagcaggacatctgtaatcgccctgtgtggaattagtgaaaacatactggagcttaaatgatgtgtgttagatttaggctgagggggaacctttctctattaaagtagctagtattctttgaatacaaacaatttttgtttcagtattaatgtacaaacccagaactgaagacagccattaacatctatatctacatctatacatccatacattaatacacacctatagattggattatgactcatagtggaatgagagatgacagggtaacatcagaataatatgaatctgagagtgaaatgtgtttaggtaaatcaaaagaacttctataacttagaatgctgatttcataacattttggggtggtaaatttagtcccatttttgtagcattttcttatctcgataaagaaatgagacaagttgagtgttaaatgaaaatgcctccgaggacataaacttaattctcacttactctgcactgtggtgggagaaatggggtcactgatttagagacttttagcccagcatctctgtattacctgaatgattggttggtttaatgatgattaacatctctggaactattaaaaatgtcagagaaaaactgaggagagtattctgtgcatcaatttgtgtagtaaattatatatacctagaaaattactggaaggatatttagtaaactgttaacagasgttgactgtgcagtaggaaatgaatggtttagggtggggctgatttttaaattttgtgctgcatarttcgtactgtaggacttttwaaaacgatgcgttatgcattgctttttgaataaaaaatattattttaaaaaagactgaataataaaggtgaaagggattagttttcttatttgtacaaaagaaaatggatggtactacctacttagcttctgaattttattgagagtgttagagagaaaatatgtactttatagggtggcatgaagtagggaatcaataaatgctacagtaggcaacaacacatcatattttagtacttgcaactgaaaatatttaatagaatgactagaaatgaagtgctcaaatttttgacaggagacatttgcactcttacatttttattgaggaccccacaaagcttggtttgtgtttgtttgtatytattctgtagaaattaaaygagaaaatttaaaagtacttactaattcatttagaagttatgatattaaaccttgtacgtagggccaactgcagtggctcagacctgtaatcccagcactttgggaagccaaagcaagaggaatgcttgcagataggagttcaagaccagcctgggcaatatagcaagaccccatctctacaaaaaattwaaaaaagtagctgggtgtggtgacatgtgcctgtagtcttagctactggagaagctgaggcaggcagatcrttttagcccaggggttcarggctacagtgagctatcatggtaccactgcatagtaacatgaaacaaatttttatgaaaaatagctgtaaccaaatagctaaacaaaaacaaattagtgagaagagtggcattggtttacatttttcagatctctttaatgtatgggttaatagatgttggactcgtatctgtttctgcatttagtcggctttgataaatttttgattgaagtgtatgaaggcaatctgacctcattttgatatggagttaaagagaggagtattttacaaccttttcgtgctattgtgaatattcttctttgatacttcaccaaatttggcaagtggcagtttcttaaaagttaggtccagtagaggatctgaaaccctatcaatggacttttcatacttttatattaaaatctattggtttaaccttaactttgaatgaatcttttactccatgcatgattttgtaacattgtgtataactcttttccttatgttgacacatttcattatgtaatatcagaaaattgcaytcattaatatcaccaccaatctcatcagaaaagtctttaaaagtatttggaaactgtcatgctcttgatggcagatagaagttttccaaaactgtcattttcccttgaatgaattattttaaccaatactgtcaattacttttacttttcttgaagtgacaagcctcacttgccaaatattgaggtctgaataataatattttcttagttgttatttcaaatgaaagtgttgctgtatacaaatagctttgataaagttcagcttccaatgccaataaaagcacaagtggtggttttccttgaaacaactgttatacttatatgtgtaagagaagtgcttctcatttcatcacatagactattaaaagtatatgtacttaaaagtcaccatttaataaaattaataatttttattggtttcatcaaggacattcttaagtgacattagtttttttgtttatttacttgttttattacaagtgtatgatggtgaagaatacaatgactacaaagtttggttcctttgattcatgctaagaaaccagtggttttactcactattttatttgcataatcaatgcaaatgtcatcactgtaacatgcaaataatgtcttagcattactataaaaactatgaaaattatttcagggacaccttgaatagttctctgggattcccagggatctaagaaccacattttgagaactgctggactagaaccttagattagcacataattacctygacaataagttaactactcagtaataactacaaagcaacttagtcacatttaagacttcagagrttctatgaaactctgaatgaagttaatggcttaaagaaattagttgctttcttcccctggatctgcgcctgtgacataataaacatgaactgtggagttgatcacatgtgggtttgattcatgataggtataaattgatctgtttatttaacctattttactstcaacttgctaacctgaaaagtggttaaaaaacaacaacaacaacaaccatgcatttcaggattaatgtgaagattagacaggtagttgtaaagtgactgacaagatagattcttggtaaatagttttccagtaggaataggaacaagagaatttggatatgtgccaccaatagggacctggaactgtcattacctcttgtatcacaaattatctcatgggaaacgattaaacatgtataatattgcaaggaagccccagaaattggtataatcataaatgtcaagtttacagygtagttcatgtcaccaacgtttgctcaaccaaaaatgatattcaatttattgataattaaaacatttttgaataatctaggcctggtaaatactagcctattcagcttcattcccgtcttgtaacaggtagtttagctattatatgmctctcaaccccttgcagtattattaaatcatctggtttaagtacaggccaaattattttacctaaaatgttgttttctatataattttgcttctggtattttattatagtggtagctaaaacttagagggcttcctgttaaaatgggttattcacatgtaatatttctgaacacacagttaatatggatatttttagtgtaactgtgatagtgagattttaatatatatacacatttattttaaaagttacaatgagatttttataatgtgaattagtgaacacaaaattatgaaaaacattttaaaagattttactattattaatttgctttatttcactttagccttttatgtttgaataaacatatagttttaaaatggacatttgtgataatatttatacatagctggtttttgaaagaaaaatgcatgggatcataattaatctccatctccatgctatttataggcccaggaatgctctgtgcctagcaccctaggtactaggatgtgctctgggtatwtctttagtttagagtctgttcttaaccaaagtctcaagggatagctatgtcgcattaggaactggcccatagtactagacctcctacatacttagtatttaggtcatttgtctgaattttaaaaaattactgggctaaccacttaataaaatatgtgtattttcatccaaatggtatttttatgaataagggccttgaaataagcataaattgtacattattctctacatttttaaatgtgttgctactgttagtaattactactgagtgcatatttaatgcactgaggaaatttgagcaattattccgtttacttgtgattccctttcaatccaaatgtctgcattaaaatactgaaaaagaaaactacagagaatttaggtcatttaaaaaatgcactcattcgtgtactctgctagtaaacttctattgcactaaccaagataaaattagaatgggcctgacatagtaaaggatagggttccaaaatttaggtgattttaaataaaattaccttttaaatataaccttaaaaacgctgagccaattgcaaggcaacttccttatggaagtcaataagagatgaatacaactgagctcaaaatttagctaatttaacttcagacaaattatttttcctcaagcctcttttcagcacttaggatttgattatacctggaaatggactgaggagacacaagttggtagctcttagaaagtctatacaaaatgatagaaataaccgagtaaaggtctaagactctctcttccatgagtgcctagcacgtttttaaagctcagagaatttgggtactgaaaaagatccctaatgctgaaaggttctgaaaataagaagagtgcaagaggggtacagcttttgtaaacccactttttattttctcctttgatcatgaactggtaagaaaagtacatgtttcacggaaatgattcaatatcatgaaaatggtttggccagggaatagagtaaggtagaaaaacccaagtattaaatgaaaggaggaactccacatccattttgttcgrtcgacatcaccagtgttagttttctttcaagttaatgtgcgactatttttatacatgttttaataatattcttaaatatctctccrtgaaagaggggagatttaaaatgagatatttttcatagctttaaaatatgttttttcatataatagtaatgagagacttgtgttcttatgcttaaagcaaagagttacattcctattaacatttgtttaactaggcttccatcacaacaggtgcacaattatttttatgagtaaaatattatcagccttcaaaattagccagggcaaaatgcaagttgtctgattaaataatcagagctgatacttaaaatacatttgatttccacaggaattttaaaatgttaagttctaatctcttattctgatgtgcagagagagttgcaattgtttgtagtatgtaagtagtagcttgtattgtaactagtttgatgyatttcatataattcaattgatattatgagacaaactactaggttatttcttctagtctaacattttaatctagcaataaagtggtagtatgtttcacattaawtcagtaaaaaaaagtggccctttccatttgaagactattctgtattcaatttaaaaaggcacatcagtttagaaaattaaaatccagtctgtgcttatttaaatttaatttgcgggggttaaaaataataaaaataatgtattttggtccataaaatgtatatagatcatatgtactgaatatattgatgaacaataagaaattcttcatggtaagaagcaaacataaaatcaacacccgctaaccccctactgaagtgaacaggaaacttatctaggaggcgacttcaccatgttttagaagtgctacagcagtgcagctgttataaaccaattacaggcaggtaactgtttattttcatagctgaatctgtttgtcaatcatggsaatgcaatgaatcrggagaggggacctcaaatacaaaccacagagtaaggcagagcatctggaatgggttcaagccacaagaattagggcaggagtatagatcgacttgaaactgtacatatgcacatggctcctgtctttgactatactcttcaaatagactcagaagtagagattattagaaataaaatgttagccttctattggaaacagtctgattttaaagttggctagaaactatatggttacttataggagtgtgattgtaaaagaaatcttctgtacatctttatgactgttaagacatttttaatattggctcataatcatcctttttaaatgaarattttactttattttttattttagaagtacattgagatatacctctgaccatattataaataggtaggtttttactactttgatattcatcgacagcaatttctaacttatataactctttataaagaaactttagttttatctggacccaggaacacatttttactcaagttagtaaaaccacctctactgttcaaacacgtagctgttgtgctcaggttgcaggatgtcaagagacagtaaagtatacaaagagtgctttacgtaagtgtatagggctagaaatttttctagtctaatatgtgggaaaacctactgagaccctgaagtttatgtccgtaacatcaagggagcataaatagaagtttattaagaaagctaaagaaaatgaaatgggcacgaccatgctgtggttttgcttaaatacaggctttcacatccattgagcattctggatttcttgttaaccggttactgaaaggagctcttttgtttttccaatcatagttttgtgccagtaggcatttgcctcaaagcatgatggctgttctctaaccctcacagttgactgtgaatttctcagccatggctatcatggtttactgttgccctcccagatggatgttgagaagcattttactggaatacttgttactttcccaagtctctttctgtgtactattcagttttgatattaggaagaagaagaggggaatcaccactatctgacatggctctctgtacctgggccattttttgagtatttacaaagactcatttgtgatggaattagaattaataatgaagaaaaaatgaataagaagtgatgattgaatgagatgacatgaaatactagagggaagagttatgattttttttttttagtctgaaaagaagaatttgcttaagagtgcaggaagggttctgaagagactctctgtattatatttcatamagaaaactggaagtaggaccacaaaaaatgccctttcctctctgctgatgaactgattcttattgtggttgacactaagaaaagctttttggttggaacattaatctcagaaccaggaagggatcttgagaattcatctcatccatccttcttttcgagaaggaatgcatttgtagaatctcagtcactccacaaatctttttaaagtgcttattatttgcccatcattgtgttaggttatgtggggtttatgtaatttcatattttctaccattcagacatgagaaattcctatttttaaagtcctaccaagaagtgagagagaaagcgctgacaaaaacaaggactaacattttttgggcaaatactttgtatcacagtgattttgtgtattttatctcacttaatcctcaaaccagtgccatgagatgggcatcattgtcctccatttccaaaagagtgaacagaggctcagaacaatgacataattttgttcaagacagcaaaatagtggctaaaccaggatttgaattgaggactatatgatgctaaagctcctgcccttgtcaccaaggcatactaacatctactctagacattattggaacacatttcctcatgcacttttcaaatctttcatactactctttgacctaaacaaacagaaaaacaaaaccaaaatcaaacaacaaaaacagtgatcatcctctatatgagaatgtcatattcttaactgtgaaatttacttctttttttgagaattgtgggactagaattacagaaaaagcctataatttttcttttcaaatttcccctgtaaattttcccttttaatttaaatttttcaggtttgaggatcttctcctttagtatagcatggcttttctaatttgctgtcaaggattatttcatattattctggctttctaggataatgtgatctacaacgcaacartgaatcatctctggctattagacagttgacagggtgcctagatawgtcatgagagtaattatagaatataagctttgraaactggatgctggctagacttctgggattcttacattgttagcatagtggcatatgtatttctgtgtttactgcaaaaacttatgaatcatgaatagaactttaataacaaattgtggtgtggttaattattaaattaaaactttgagaaatagttaaaggaagattgtcatctctcttataatgactccttactactattcccatagcctttatctcaccctgaaatctattaattgcttgattgtcttgacatctttctattcgtaccataattttccggtattcctgaagatattttagggagtcagctttgttctcttttgctcatcatgatgatgaaatagctagtactcatgaaatgacaagtgttttgaatttgggaatatatagaggacattattattttgaggattaagtcatcaaattatcttaaacaggttctacttaaaaagttctaggctgggcgcgatggctcacgcctgtaatcccagcactttgggaggccgaggycagctgatcatgagatcaggwgttcgaggccagccggwtcaacatggtaaaaccccgtatctactaaaaatacaaaaattagctgggtgtggtggtgtgtgcctgtcatcccggctactcaggaggctgaggcaggagaattgcttgaacccagggggcggaggttgcagtgagccgagatggtgccacttcactccagcttgggcaaaagagcgaaactccgtctcaaaaaaaaaaaaaaaaaaaaattggttccagtgcttgagggggaagccaagagaaatcagacccatgagtatacttaaaaccatatgttagacagatactttaggtatggctaaagtcatgaatggggatgtgaatatggcatctccttatagagaaatagagtttagacaatcaacactgacagtataggagcagcgggtaatggttattttagcagttgagtcactctaagggatcagasaggtccaagaatgtaagttaggagaatgaagaacataaaggcagttacccaagcacctgtgcattagataacaagtgtcaaaaagtaagctctgttaaaaatgagtcagcgtataagatgcagaaggactaggtagtaagtacccagtaattcagcactgacagaagaagagaaataggtcactacaaatagtacttgagagtgttgtgacctttgattctagggtgagattgtcctgtcctagttacctgcttagtatagttatagactaatgtttatggctagatagaaggaaaaattttctagactattctaaacctgtgttgcccaatactgaagctattagccacatgtggctacttratcaattcaaatcaaattaactaaaattaacatcagttcctcagtaacattggctgcattttaaggcttacttaacataccttgttatggctatcatattaggcagcatagatgtagaacatttccattatcataagaaagctctattggacagtgttcttctatattataatagccataaaaggctaagtcttttggggagttctaatgctatcaaaatgtagaatctacaggtatatataayaagacgtttctatgataccatactttaaagaagccaagaaataatattatgtcaaatttagtgagctttctgaaaacaagattttgatggaagaattctattaaatgaagttagttttgaaattggtgttcataatttttttttacttatttgtatattgttgcaagaaatacagacttttttcttcactgaggaagatgtattaaaatcctgtgggaatggatcataacttatatacagaaatgctgaaattatattaaaatctatttttctcacatgtatactgtgtgcttggtggagcatatcagcttttgtgggttacttgaaattttctcatctccactgatggctaatgggaaagctgatccttctatctttccttcatcaaactgtcagcaaggcagcttcctgttttgagtggtatttttcattgtatttaatactcatgtttttatgtatgcattcttcattgtgtttaatacagattttgagtgtttaactaggtgtcagagagatgcaaaaacatatacagggaaagacagggtgmggcagacagagagatttagacatgctaaggaaaatactaaagaagaagaaaaatattagatttatcctttcaaagtaaawaaaactctaagagaaaaagagagaactatttgcatttataattttgtatctagtattttccctgatatactaaacccatgccagctaagctttctgggcataacattgagacacttttagcactctgacaccttcctagtatccagctccatgtgccaccctagagtcatttatcctagatttgaggtccaggaatcaaattaaccaaaggtacaaaagttcaggattaagatgagagggagattttaacaaagatgacctcaaggtctcctgagagtcaccactgttaggttttgtggcttctgcaaggaaaactcaaaattctctttgttcagagtactgctttttggctttggcatgaagatacttgaacagacagacctggcctttaacatcatggaaccaaaatccatgtgatagacatagcttgtgagattcaaacttgctcaaaattaaataggcaatttgcagaagaggatgtctgaagaatagggaaatgcaaattaaagaaaaaataagacgccattttgcatccatcggattggaaaaaaattaagtgtgaggagctgagattctcataaactacttgtgagggtctaagtttatatatctgctttgagaaaagtttagctatatctagcaaagttgaagatgcacatactctatgcattaacaatccaacttttatagttatatatttatatcctaaagaaactcttgcacatatacaagaatgttcattatagcattgtttataatagcagtcaaaataaagaagcagtcaaatatacaatagcaatgcatatcaacgtgtgaatttaaaaacataatattaaatgaaagacataaaattatatatctagtatatgataaaatttatataaactgaaaacatgtaaaaataataccgtagatattttcttataaactcatatgtatgtaatagtataaaaatattcattgaattgataaacactaaatttagtggattaaatgttaaaaaaataaaagcaagctctgcctcagaggcacaggagactgctggataaatgtgatttgtcatcatcttctggtattagagctaacagcttttctcagactatccatgccactctgcttcaccaagagaagttttctaacttgcctaggcctcatatctgtttacagtgtatctgttggcctttttctgacttcttgtcacaggatgggtgagggtaccaaagccttcagtcaactggaggaggttctttttttattttctactgtacatttctacctgaaaactgtaaacttttaatatgtctaaaagagaactcctgattttctttccaaaatctaccacacctaaaatctttctcatctcagtaacggcaactctgtgctaggtgttcaggtaaaaaacctggaaatcaactttgatttttcactgtggtacatattttccatttgcttctctcttaatccttctaaacttgctctgtgctctgggagttcaacttttatgcaccatgttagtgatttccctttctctttgacttccagttgggttcaaccaatgtgagacactgtggagaacaggagaagagtggcatcagtgtcttctccctggtcttagmtcttttcttgccagattgctatagactggttgtaacctttcatgaccctcttcatacaactacattctccagattccaggaaccattctctcaccttaccctagaagcctgggtataatgacagcttcatcctgtaactgtctcctggatacagcactatccctttttgttttccttaaaccttgccccatatttttgtaaatagtttttttttttttaatttaactctcctcaaattatccagcttaaatttgccattgctatcaccttggtccaggccattaatytctcttgcttggattattgtaaaagcctcctagcttaaatccctgctttctcctttgtctccacacagtctgttttccacacagaagccagactaaccttttaaaaagttaagtcacattactccattgctcaaaaaccctctaatgtatcctcatattaatataagtaaaggccagagtgcttatgatggccctaaacatcctatcaagatacatatggttggttcccttttacctctttaatttcatcttctattaatctcccctttgctttttwaatttttttatttttatgtgtttacctactgattcttcccaaagaggcaccacattaggacttttgcatctgttttttattcttagaattctctactcctaagtattcccacggatcatgttttaagctctttcaaattcttgctgaaaagtcatcttctttgggagaactaccttgactatcttgcttaaaattagaacctcttccacctactcagctgttttcttctacagcgtttactatctcttactatscctttaattggtcatttcttgtatttattgtctgagttcctccactagaaagtaagttgcatgaaaacagtatgtgtcggttcactgcctgacccaggtaaattatatttattgaacgattggttaaatgtagtgagtgcgagagatgcctaagaagcctgtgagtgtgagagaaggctgtttggagtagttgcttttattctgtcttcgtatcctgacttctctccacctatatggaactgctcctgattgggaattctagttagtttatactgcaagaccacaagattcatctgccaccatcaattttagaatatgtacatcaccctcagagaaatttcttaccttttagcagtcacttcccatttcgtcacaactccccacccctaaacaaccactaatctactttctatctctgtagatttgcctattctggacatttcatatgaatggaattatatatgtggtctkttgtgactggcttctttaacttagcacaatgttttccaggctcatccatgttgtagcatgtatcagtacctcgttcctttttattgccacatgatattacactctatggctatatgccacattttattcaccattcatcagttgatgaacatgggttgtttctctttttttgctattatgaatagtgctgctatgaacatttgtgtataaaattttgtgtggatatgtttttattccttttgggtataaatacctagagatggaattrctgggtcatctagtaactctgtttaacctttggaggaactgatagactgattccaaagcagctataccattttacattccaaccagtagtgtatgtgggtttcactttctccacatactgtcttattaacaatattgaaaacacatttatagcaattctgttgaatagatactataaatcttatttttatatatggagaaactaaggctcagaaaaagcaataataatttgtcccaaactgaaaagcctagtaagtattggagctagttttccamctcagttctgatttaaaactcacatttttcatttattcaaaaatgtatttatttttccagaaaaaaaaatatatataattttttcttttttttgagacagagtctcatgctgtcacccaggttggagtgctgtggtacgagcttagctcactaccatctccgccttccaggctgaaacgattcttgtgtcttggcctcctgagtagctggggacaggcactcaccaccacgcccagctaatttgtgtattttagtagagacggggttttgccatgttatccaggctagtctccaactcctgcactcaagtgatcctcccacttcggcctcccaaagtgctgggattaccggtgtgagccaccctgccgggcccagaaatatttttgaggatcatttacatttcacacatatttgagtgtctagtatgtcttagaattggggaaccagttaactcagtttgcatagagcttagccagactagtaacccagaatcacttacatagtacacagcagttctcatacctttaggttgtttttaagtcttaaaagctaatgaagacccccgaaaagctttcatttttatagcttttgtccacttatattctagtattagaaattaaaactgagaaaaaatttaaaatactaatttgtttaaaataacaataaacttattgccaaaacaacatacttttacaaaaacaattttgtgagaagagtggcattatgttacaatttcataaattttttgtatttcaggcttaagaggagatgaattcccatgtatgcttctgcattcagtctgtcacaatatgttgttttggttgaagtgtatgaagcccacacatatatgtatttagaaaatgaaatattttaatagcttattgagatatttgtggatattcttcaatactacatcaaaatttacaagtagaatgatgatgtggaatctgaaatataaagcatcttcatattttattacatgatattaaaatccattgatctgacttacaatttgaatggatcttttaccattgcatgcttttgtaagattttgtattggtcatttggaagatgttatatctctgagttatatagaacttccaaatgttgacatatttcataatgcaatgtaaaaacatcacatccattaataccatatttgctaatttggaggctcagattctatcactgacaaacaaatacagttagttgttttccttcaagtgaaaagctcactttgtttcatttttgggaaaatacctgttaaaaattcaaatctaaataaccactctttgtctgtcagtcattttttcaagtaaaaatgctgttctattttttaaaaaagcagtctactctgatttcaaagactagtacagttgagtgccactgccttaatttgtgcgaaagcgccaggaatttcactcaccattgcttttgcaccattagagaaaataccaatacagtgaaaaagacagaaaagattatagtattattagaaaagtagttttatgcatacaatttaggtgtatggctatattatattcataccctgatagtgtccaaaatgctttttggagtacatgagagttgaaggtatgaaattcaaatgacagatgtgtatgtaatactgatgaaggaaataggcactctcttcccatagaattaaatgtttatttatttttaaaaagtctacacaattattcaaaacatcagatagaaggaaattaatttctttaaatatcttcttacttcaaattctatctcaactttctttaagtgacctttagtagaaataatccttttatgttgggaagaaataacttaattagttagccttgagcaagaaatattttcttcttaataatttcaaaaattgtaaattagtatttattaatgtagactattatacaatatcaatatagaagtatataaagaataaataaaattttctcattcctttgtctctgctggccttattgcacagcccacagacaatcactgttgatacttgttgtttatgcaacacattcctatgcatattttagttttaaaaaattatatttttaaaaatacaaatgtgctatgcaactttcttttttttcaaaaaacagtacaaactatacctcattcttggggataaaatttttgtttattttgttcactaacctgtaaaatctagaacagcacataaaatgtcctcaataaatatttgttaaataaatgaatttgttctttactttttttttttttttgagatggagtctcgctctgtcgcccaaggtgggtgcagtggtgcgatctcggctcactgcaagctctgcctcccaggttcaggccattctcctgcctcagcctcccgagtagctgggactacaggtgcccgccaccatgcctggctaattttttgtattttgatggggtttcaccgtgttagccaggatggtctcgatctcctgacctcatgatccgcccacctcggcttcccaaagtgctaggattacaggcgtgagccaccgcgcccagccgaatttgttcttttcatcagtttgagggctgtctgcataatattcctagctatcaataaataatactttgtttatmcattcttctattgataagcatttggtttcttcttaatttctcacttttaaaatagtactaacagttggaaagatgggtagaagagtgttttgggcagtgtgaatagagtgggtaagacacagcagcatgagagagaaatgacttttctggagatttttatgttttcagtgaaaatagtggtatatgtgtatgtgcatttgtagtaggggtcggtgtgtgctaaatttggatgtcaaaagttagatgaggcgagatgggcaagtaatggcaaaatcatgaagtgctatgtatatcatgttggaaagtctggactttattagttgagagcctttgaagagtttaaactcagagagtgacatgatcatatctaccatgcctgaatttccaactttccagaggttgggataaagtgacactttctagtcaatgaaagtgtctgtgattatgtaaatttattaaacaggataaaataaatcataatatttctatattacgctacttttgttcttcattcttaagactctaaaatagattttaatatagacattatatgatcataatggcaagtatttattgagtgctcactatgtgaaggcaactgttctaagtgcttcacatgtattaacttgcgttaactcacttgatctatacaayactctatcactattccaattttacacaagataaaacgagaccaaagttactgttctaggaagtggcatagcaaagattttaaactggggaatctgactccagaacccaagctcttaaacacttcaccatacttcttcctcagtctgattattattacaatatgcaaacaaaactcactaaatttacatatgaaactgtaacaaatcaaagaattaaaagttatatttcctcatatacagaatgatgtaagttcaccttctgtattctgtttttattccaacagaggtcttttgtaaatataaagagataaaaatgtattttgtgaattagtgagtttgttggccaaactgacattagttataatgtaaaagaaattgacctttataatgcagaatactcttaaaattaacaaaaatatcgcatctgaaaagttaatgctagttgtacattaacacataatattaacctaataaatgtgtatatgtgtgtatatatacaacatacatacatttgccattctcagtaacataagtgttttttttttctaatgctaccaaaatattaatgatctttacaggcatagtaaaaattgaattacttccatacatttttaatattgcagagagcccacactaaaggactatttctagcattgtaacccaaactagaagtatccttataggttacctagttcaacctctcatattacaggcaggtaaatggaagcccagagaattacttgtacaaggtggcaaaattgaaactagaacccagatctcctgacttacattccagaaaccttccactctgtaacttcatagttaatgaaatattttatgtactttaatagctcttattaaacaacttataaattgtaagatgagcatagtactattttttgagtttaatttttttctacttctctgtcattttctatataccaacaaatgcttaataactatatacttacgtgatttatctggcctcattttggctgttaaatcttcataactctgcatttctatttttctacactcccagtatggcactgattttttaaaattataatttcttgttattttgataccttgtttccaaagaacttagactaccatattttacataagctcttactcttattaaaaggaaattaggatctggggaatcccttgagcactcaagttttcaaatacatgggcaaatgaaatgcaaggattcttgtggcccatatgtcagtggttaaatttgatcagtgatgggcattgaagtctttcaaagcccatatgtaactgttttccctatagaagatcycaatttgctatttctgaaaaaaatatcatttaaactatggttaatctcctcccttaactagcacatatgaaaactcatatgctggttctatcgtggaattcttagtatcattagacaagttgtgtctcacaaaatactttcctataaattgcttctgctattagatgagcatttcattgttaaattacatgttagacatggaaaattaaagtgctgaattaagaaccaatgttgcttcttaagtgaactgaggaaaatgataacgaaaatcaactatctaccaagagagatttaaagtgcattatttcccttgatttttttttaaaaagaggaagcatgttatagcagaaggagttctgaactgagaattaggacttctaggttctagtcctaactctgtcactagctaattagctatctgacatcaggcatgtcactttcccctctggctttcagctttcttatttgtcaaacttgggggttgaatgatctctttgactctttacaacattgatttcctgagtgtgtaattgtttgaataagtgtactcttaaaaagacaattcaatttagtttttaatagataagatagattttttaaaaaatcacctccagatatagattaatcacggttgaaccaggggtcagaaatatagtagagaacaaataagctgggctgattggggaaagtaaagttgttttttttctttctttctttttctttcttaatgtttctcttccccgctaaaaagctcagctatgcagtgacctttgtaacaattgttgaagttcaaattggaaaacacttttggaactgtatagatatacacataccaggcatactacacacaccacacccccacatgtcctctcccttcctccaggtctccagttcttcagtttataggatcaatctgggactctaggttgggaaaataagcacactgttgctttagtactaatgagaaccatgaaatttagagatacgaaaatttattctcagatattagcctagaagaattggatgttttgaagtggaaagggaaataggttttaagttagagtttaaattttgggtcaatcatrtatcctctttgtatgtttcatcatatgtaaattggtggtggtgataacagctacttaaaaagtggtgttttttttttaattgacaataaaattgtatgtatctcttgtgtacaatatgatgttttgaagtatgtatacattgtggattgactaaatctagttaattaacatgtgcattgcctcacgtaaactttttgatataaggttttaggctaagtccattttttgatattttttttcactttactaattcagagaaaataggttaagatgagaagcttcatactgaaaattacttactttgtatttttatcttggtagagttgcaatgccggtagaatttctaccatggttttttactttataatgataataacatgaatgatagtaacaatagtatcacctcactattgctgatgatctctgccttataattatttgggttgacaaagagaattcttcttgactctaagtgttctaagctgctcttgattgctcaattaatttgaaccaatggagggaacaaaagtgtatatgtaggcaattcttgattacctgtgctcttagttgcacagataactccaacagtagctacttcagatgtttatatttagctcatgaatggatttaagcgtttatgtttgatataaccatgtctgatgtttgggaactcttgtctttggtttgttgtgttgataattaaaccttgaaagtgttttgtctgaattcaaagtatattacctacaagaaatatattggccaaaaactcttacttgcaatatgaatcttcttgggagagtcttgtttgtttcattcatctccttgccatgtagaagagtgctgtaatgcttgagttactttttctccttccttttttttccctgccatgagtttgttaattcactctttgcttaaagaaaaatgtcagaaagctaaatttttataaaaatggtaacagttattgtttaactgaatttggttccaaagaaaagaaacctgaagggcaccaaacctatattcagttacattgggttgtagtgatttaatcacttgcctttggatttttgtggtcctcagaattcctaattgatgctcactttagtatttcagatttttctcctttctttgaaaccctgattgtactacctyttctgtggcttttattagtatttactaacagttacaactttactcagagattcctataaagcagtgcttgaaacatccacgaatggcagaatcttttttttcccagtcatgtcatagattttctatgtattttggtgtttgcttgttttcacagtgcctttttatcttcatctggtttagattcattggttttaaaattacgagtagtctttagtagttagctatattaaatacatttatttctgtgttaggttagtaattatatttcatttatagccttccaattccttctttttttaaaagccattcttggaaacttctagttagaactgactaggtataagcttgaaaattttagaactcaagtgtagttcagttctggagagataggtggttgtcttttgtgttcctgctcatatgattggggaattattttttaatgttagtgagaaattggttaaaccacattgctagtaattttctagaaacttaattataaaatctcttgaataattgtaggctgtagattttctaatactatcttgttgaatggggaaaaatactttttttcgtggaatttattcagcagccatttgttccatggcttttgttgaattggaagtcttatctagatttcagaaatttggttgagttttctgcttaaaataatgtgggaaagtttttgctttacgatttttatgctacacaggacattctactagtcttcctttacaataaaattcattatgtcttcactatgtrtatattaataacatggccttagaatcttcagaagcaaatgaaaatttttcattggtttatgttttctttgtgtgtattttcatcgtataagagttgaacatgtgcttaatataaaaattaaaattcataatagtgctgtaaaatttagatattttaatactctcattttttacatgggcatttttctgttatttagttaattagtagtgaaagtataagtttttcacttctaaaatgggaaaaatcggaatgatcttcatatatccttaattgggagtcacttttcatgaaaaataaatttattatttctatgaattttaaattaaaaatctctcttaaaaatactttgcaggccgggcgcggtggctcacgcctgtaatcccagcactttgggaggccgaggcgggcggatcacgaggtcaggagatcgagaccatcccggctaaaacggtgaaaccccgtctctactaaaaatacaaaaaattagccgggcgtagtggcgggcgcctgtagtcccagctacttgggaggctgaggcaggagaatggcgtgaacccgggaggcggagcttgcagtgagccgagatcccgccactgcactccagcctgggcgacagagcgagactccgtctcaaaaaaaaaaaaaaagaaaaaaaaaaaaatactttgcaaataaggagcatttgaacaaactttatgaaaccaagattattagaacctatacattgttaggtttactttaatgagttatatctatctatatatagaatatataatatatacatttatatatttgtttattatgagtttctacatattttaaatagtgatgaattgagcctaattattctaaagaatagtgccattcatatttcagcttgccagctacataaatttattccaggaaatttttatgacatttaaaaatcaactatagggttctatttatgtaatattaccttgtcagaaactgacattaaatgagaacaagttgtgattgtgtattcatatatcctggcttacctggtattgtcctggtttctatacctgtgttcttgacataataattaacagcacctcctttcatttaaaatgtcgtaggttggatgatgtattttatgaatgacttcacatgatggaatccttaaagggattttttttttttttttgagacggagtctcactctgtcaccgaggttggagtgcatggcaccgtgtcagctcactgcaacctccgtctcctgggttcaagcaattctcctgcctcagcctccctagtagctgggattacaggtgcccaccaccatgcctggctagttttatatatatgtatatatttttagtagagacagagtttcaacatgttggccaggctggtctcaaactcctgatctcaggtgatccacctgcctcagcctcccaaagtgctgggattacaggcaggagccatcgcgcccagcctgtattttttttaagacctactatatgtctggaactgttataggtttggagaaccagctaatagtaaacaaactaatataaaaatgatgtaatcaagtaatttagaagattttatatattattgttgccaaaaaggtgatcaagtagattttctttgtcaaagaacataacagttttttcatcagtgcatgataattgagtacttttggaatcacaacactttaaacatttagacaggatcctatttacattttagaaagagattaagagatattctatagatgtgtcagtatgatggaaagaatgcattgtttttagaaagtcaatgagcactttaaamactttcaactctgttttaaaccttaagtataaaagaaactagctacaaatacccatttaattaaaactgtttttgagaagtagaacaggattctcaaatggggttgctgatagcttgtaaaaatgtattcaatatgcctataaatttcttaaactgtagaaagtgagtcagctagccaaaatcttcttggctagtaagggtgtacaaaatacagagtgagaagactgagtaggaggcagatttaagaactgagaaacctgatatctggaccaactaatagtgacacagggtcattcttccaacttttgagattcaactaaagaatggcttkttttttatctaaagtrtaacttctgaaaacattctcctacaaaagctttggtggcattatggaaggtgaattaatttatcaatcatctgtgactccatggacagtcatttctttgggcaattaagaattagaacctgttttctgataccagtgtattgacatataatttaattttactggaagaaggtgatgttagaaagagttaatataataatataaattcttgtgaaatttttcctgtaaaattgcttagtttgtataatttatttggtcctgtagttgattctgccttctaaattatagtttatgttactagaactgtttgaatttttcacacaattaaaaattgaatttctagatgtaatattttctgaatacagaattttcaagtctgttgatggagactagttccctgagccatcagacttcttttactgttcacggaccttaaataacattaaattgtaattatcctaaatataaattagtgtgccttttaatatcactgtatctcccaacarcgtactttaatgttttaaaatgcaggaagaagkcttgaaggctatgtgaagtcattgtcttaaactagttaactttttttaaaatttctcttttttccagaaacatttatagtttactgaaaagaggctggggttgggtattcagaccaactggcttaggaatcatagctctattgattacaagctaacaagctgtgtgatcttggacatatttttaaccttcctcagcatcattttcccaagtttgttgcagtagagaaaaaatgcgaaatgctaatcctagcacatagaaagtrtttggacgatcatttgtgctaaaaaaaagtgtttattgaatgttttttagttcaaattctttatctcttgtcttctcttagatttgattttctaccacttgtgcaacagtggggatggctggtgagttcagttagttacaatggttaccaaactagaattaactcagatatggctcagatactcctgtagttcaaagcaattctttctggtttgttaatttctttggccgtctatcaccaactattctgagaactaattatttagagttggttattagttcatttcaaatttactgagcacaaaatcagtagtagacatgtagtcatgtttgtgccttgtcacagagatgcatgtgacacagatcctccccttaaggagctgacacgtaggaagtatacattgtggcttatcatttgttcttcctctccaccagttttctcggtagaattatgagtagcactagagtagattcttacctaattcacagcaaaggctttgaacttgggtagggagcaaagagagtgtagtagggaaaacatccttgagatctgtatttgctccctctacaatccttctgggaccattgatgctataataatttttttacaagcaatgatcttttaaagtattacgtttaaattcaagttttgtgataatctcatcgccttttcagatgtttgcctcttcaaaaggtgatgtccaccactgctgaggttgtttttaagtactaccagttgtggtattatattccttatgaggctcataatttaacgtattttttccttcttgtctcaggattacatatccagtttttgctttcaagctaaaaaatttaaaaacccttatttttattgatctgaaagttgaaaaaccatgagcattttaaagttacgttagaaagtgagttttataagcttcttcttaaactcaatttataatctacaattattgcataaagtgattttaaatctttaaaaatcttgaattggctggcactttgggaggccaaggtgggtggatcacctgaggccaggagtttgagcccagcctggccaacatggtgaaaccccatctctactaaaaatacaaaaaaaaaaaaaaaaagaaaaaaaaattagcagggcgtggtggcaggcgcctgtaatcccagctactcgggaggctgatgcaggagaattgcttgagctggggaggtggaggctgcagtgagccaagatcgagccactgcactccagcttgggcaagaagtgcaaaacgccatctcaaaacaacaacaacaacaacaacaacaacaacaacaacaggaaatcttgaattaagcttttctaagaatttgtgacgaatgtcctagtgtgagaataggacatcctatttgtgacaaattattttttataggttgaacaaatgtatattaacttttaatttttataagtagaggcttaraaatttctttttagaattttattcatgttctactttagcatgttcaaaataatcctgtgacaggagactcttggtcatttctggacccagkctttaactgtcttttcttctctttgacattccattattttctgtgccctgaatattgtgaatgctacataggaaacattagataatcttgaaagaagttttattttcataatacactgatgagatatatttggcagcacctattttacccaggaatcattattaaggtcaacattgtgaatgaaaagaacatgctatttatccagctatatttaactataaaagaacaataaaagaaacagcagtttttagaatcaatatgaaatttccagttccattttccctctatagactcacaatatgagtttgtgataggtgggatctgtgttacttgcctgttacctgatcatatatactcagcactgtaattcaggaaactatgagctatctatgattatataaaaacataatctcccttgtcggtcagtttcattggaattgaaggtttttttaagcgcctgttttcattaaagtctcagtagttgcaacagccacacccactaggatgtcctgagagctacagacaacacagaaaaaacatgactgaactggactctctagtttgctgatcaaatgatttgggggcagggatgtgtttcatgacagacctggaatggggaattcgtagaggagccaaaatggggcactaaaaagccagaggatgttgggcgtggtggctcccgcctgtaatcccaccactttgggaggacaaggtgggcagatcacctgaggtcaggagttcaagaccagcctgtgaaacatggtgaaaccccatctctactaaatatacaaaaattagccaggcgtggtggcaggcacctgtagttccagctacttgggaggctgaggcaggagaatcacttgaacccaggaggtggaggctgcagtgagccgagatcacaccactgcactccagcctgggtaacagagtgagactccatctcaaaaaaaaaaaaaaaaaaaaagaagaagaagaagaagacagaggaccagtcaaatcagtctgttggggaagccaaatttctaccatttgagagtccaagtccagaggtccagtggaatgaaaattaggaatcaaggtagaagtctgagcaccagtgaacttggagggaacaagatcagagtaagaaaaaaaaagagtatgacagtgagtatggaagaggagagtaaattagatgactacaagctgtgttggatatttgtgacttggactgaaaggtcacaggacattgtactagtcgctgggatattttaaagaaaatagagtgtcatagataattccctagataagtgctttcactttagtaaacagtatatttaggaaatattatattccaacaaaataaaacatccttaaaaatagattataaggaaaatctcagctacattgtctgttgggtaaagtaattttgagaaggtaggacattcaggagttccattctccatttatcatagtggttaagaggacagaatctgttgccagactttctgattttgaatctcagatatatgatttaatagctaaggatttgggcaagctgcgttacytttgcatgcttcagtttccttgtctttaaagtggaggtaacaatatgacctacttcataggactgttgtgaggaatagatgacttaatatataaagcttttcccagtgcaaagcaattgtagtataagtttaagctattattattgtatgaaggggcatagtgggctagagcagagattcccttgatttcctctaggcaaattgtaaatacaccctagaaatgggcacagtatgtggtatgtttgtatgggcaactgtcccaagccttagttgtatctgggaggtttctcaaatcatgctagactcacttcctagacttctccacatacctttctcttggctagaacctgacagcctcagcctacatatacactgcacccrgggcagcaggacactggactcctgcaaatatttgagtgtatttctcatactttcatgggtgttgtaaatattgtatctggaatgctggagaatgccggagaatgccagagaatgtcggagtctgcataattactgtatttgggcctgaaaccaggaagccatatgctatttgggaagagaagggttggggaataagcatacagagaatctggtctgccaggcttgctgctaatttctagagtaattcagacatgtcacttaatgtcaagatctgttttcacatccataagatgtcaaagttcaatttattgacctctttggttgtctgattgctagccaagctttttgccttattttgtaaacaaagccttaactgagaagttgtacatttcttcattccttttagttgtatatctcttagctgtaaatagcattaggattcttggtacctcagaacattgctcctaacttttagaaattccctaactatgtattctaagtgtgagatgagggaagatacctctttcttagactctagactcgcttggattaaaaatcagaagatgtgaattcaaattcaattaaatgctctatgacttggtcaaattactttctgtctcaatagcttagtttttcatctgtgaaatgaaaataacaatgtaactttttggatgaggattaagataacaagaatttttaagaaaatgccttgttaataaagtctrtttttcttactccttcccttcctctcctaacgctcatggagcttctagagaaagagccaatcctgcaatacttggtggtgatattgacacaaatgatttaattgtttttcccctttaaaggacaaaagaatttcatgtttctgaaaggccagaaattactatttttatgtgtaggttatggagatgtagccagtgactggcagtcacccacagagaacagtaatgtaaagacagtctgtcttatattgaaggagagaagtttcagaataccttcgtttccagatccaaaaaggatgggcttataaagcacaatgggctaaaagcccagctgtgaggttgggagcctagatggcaggattccatggattgttcttgctctgttaggatttgcgacatgaatagacctcagttgatccaggaatagacttccttttgcagccaggaagaggggaagtaggagacttgagtgtgcctggtayaggagagtttgatcttaatttaggaaatacctgggtatttttgccttgttagtacactgtagattctaatgacattttaaaggtgaatatcaagaaggaaattctcatacattcagtgaaaaagaaaacaacaacaacagtaacaaacagcctatacctcaactcatgaggcacacttcctgtgaagtggtccctaagtgattcctaagagcacaattgctgcatttattaaactttttatttactgaggaatggacagtagcatatgggagcaatgacaatagctgactgatgagaaaacaaagaaattccagtattctgctgttttgaaaaaagtcattcagaatttagtcatattggttcagctgttgtaaccaaagactgataagataatagaggtctttgtggtggttttgtactgaaatcctttatctttatgatgcactagggccrtttagtgtggaaagcttttaaaactgctattggattcagaactcaaattagctgctggtatgctgggacaggggttcctttctcaggcagtcaccacaaagtaacttttatcaggggaccttctgatagattgttagtctcttcagcttaccctgtttattttttgttgactttttgttgctatgttttgtgacatttaaaagaaggctktatcyaaaacggccaatgctaaatgatggactgagcttgtgaagtggagacatcacagtccatcagatgtgtgaggaggctgcagtgtaaagatgcagcagttttcccaggttatctgtgggtagaaaagagcaatgcagctttcttttatgactagcattgttattttggctttcttctaaaacgatatccattaaaaaaattagaactgaccagggaattgattcttaagagcttttgttttcaacttaatttacaatctttctggattgttggctgagttccttgattgatgttgctttggaattactgttaagtgctttaatctttctaggatttatgtgaaaaagtgtatcttcatcagaactccactccagtgtcagtgccacccctacccactactctaaacacagacatttgttagttacccaggtttcttataatttcattaagtccgattaagtttattaatgtgtgcattgatctaatacaggagaatgtctaggtttaaatctcattttaaattccctgggacatgtttctagagaatgccattagttgactattaattttatttggcttggtatgttaacaccattgcccttcatttatttttattttttttttaaagacaggatctcaccctgtcgcccagactggggtgcagcgatgcaatcatagctcactgcagcatcaacctcctggtctcaagagatgctgccaccttagcctcccaaattgctaggattgcaattgtgagccaccatgcctagcccattttattagagatagaaaggatgtggagaaatgcacaaaatttaatttagctgttctcgtactcattttctctcttttcctctcttaactctttttctctttctccgttgctgtgttgtttctagattttctcattagaaaaacttagttgtcatcacatagtggtgactccctttcagagaatatctatttaatgaatgacctgtttaagatttttatattgtaaaagttctaggtatgggaatactgtggaagaggtgaggtaaatctccatttagtaaagtgccctgcaagttgcctgccttatccagatctggtcttcagtgacttcccaatgaccagtcttatttctagcaccactgattttgattatatatatttcataagggcaaaattagcagactgtmgtgctaacttttgtgaactgatgtaaaaaaaggcttttaaatacattttaaacttaattttttattttaatttttcatgctatatcaataagagaattgycttatttatctcattttacctaaattctcatctgttttgaatcttctctgtggctttgggcctggggacaggtagtaatagtttgtaaagttaaaaaaaaaatagtacatttcagttattttttttcaagttcttcagattgtgaccaaaaaaggctagagggctgattttgaaactgttataatgaaagatggtatttgaaaacttttgatgggggaaattgtcatcatatttatattttgaaaagtgtttccttatttacgcattattgacttcctattgagactcaaaattttaagtacaactggtaaagaattcaatggatcaaattcagtaaatctgaagtcactggaataaaggcccctaagaaaaaaaaatgtgtcaattttaaaggtctttcctaactgaagaccattttgtgatagagccaaaggttaataaaatcagtagtgaatgtagcaattttacagataagctattcacaacaagtgtagttacttgaataaaaagctaattcagttctaaaatgccacatgcagtagcagtgaatagctgcttttaggtgctttctggaggaggataaaatacagaatcacggcactcttctcttccagcgtccctggctgcctgtaaattgctgtgaatggggctgtgggctgacaggctctattaagacaaactgcctttctcatcggagagataaaataratcaggtgtttagtcaaattaaaatacttcagctggagcaggccctggggagcactgatccacctgactaatctgagagaaactcaagacagatgtggtttggggataaagacgaccccatggaacaaaaaaaaagaaaaaaaaagaaaaaaaagaaaaaaaaaaccctgctgcactgtctttggagttggagaacagatacagtttatagtagagagtgtcaggcgcacactgtgtgatgttggataaaaggcatgctgacttgtagagaagctgtgtacagaagtgtttttgctggttccctttttgtggtttgtgaaactacctctgtttttatgtgggagctgggcagaagactattttctggcagtgctttttagagaatcattttaagatagcttgaaggacatgaaacagatgatgttaggtagctcctgatgacctctgctggcctgggcagatcatcagaagttggtttactttttttccaagttgattttttcaaacctccaaacatgatttaggacatgatttttcttttctttgtttttgagagatagtctcttccacccaggctggagtgcagtggcgcaatcatggctcactgcagtcttgaactcctgggctcgagtaatgctcctgcctcagccttctgtgtagctgggactacaggtgtgtgctactatgcttagcttattttttacaaaaaaatttttggagagacaggttcttactatgttgcccatgtagttctcaaactctgggcttcaagcgatccccccacctcggcctctcaaagtgttgggattacaggcatgagcctctgtgcctggccaatatactattttctatatagagttaatgcataagagcattcgaagatcttttgccatccttaacaaaacttaactatattttggttgctcctttatgtctcatcattatctgttctttcagcagctcttacaattgtagttcctttgccatggtaaagtttcatgtttaatttttttaagataaaaaaacttgtattcacaggttggatggtcagtgtgatttagacttgatgttatttttattacagtggcatgaacacatgctgttaattaaaacaggaaaatctgcattataggtcttaaatgcttggcttcaaaccattatacccgaacaaatacagtgggtacagaacagaaaaatgcatccccctcccactgccacgcacacacacaaattaatctgcacattttgaatataagctattgtatggtgttttttccctaatttgagccccaagggctacttggctatatatatgatccccaatacagggggaatttcagacttgttacactactatgcttcactccaacttcatttttaatgccactattcaaaatatatacattaaaaaatctgaggatgctcaagttccttatgtaaaatggcctggtatttgcatataacccatgcacattctttcacatacttcatatcatctgtggattacttataacacctaatacaatgtaaatgctgtgtgaatagttgttatattgtgttgttttatttgtgttattttttattgtgttgttattattttaaaaatattttcagttcgagattggctgagtctgtgcttggttgaataagtggatgtgcaacctatagatagcgggggttgactgtatgtactcctcaagtttaaggaaaaaatagtgacagccttatatgagtgtttaaattctcattttaaaaatactgctttctgcattttcttcttaaacgtgtatcttttaagtccaaagaaaaaatttagatgccactgactgtttacaattggattcagctaaatggtgttattccataaattcagttatacttatatatatctattaaccctggaagcaccaatgcatttataaatcttttggcttcactgtgaacagaagaggctaagaagtcacttaggtattatctttagcctctctgtgcctatgcagaggagaaaggggagtaagttgaagatgattgaaagattgtttaagatggaagaagagaaaaatttccagtatttattggggaatctaaatactagatccaactctggtattggtccttgcccaaaatttcctgtgtaagctcttctttattaacaaaaaattatagtacagtaactatcactatatccaataaaccttctcttaacttatatcatatagacaggtattatgatacaattacacgtatgttagaatattgcacaaaatataataataaaatacgtatacatcccatttatctcatgtctttccaatctattcaccacactgcaaccaaaatgaccatatcactcatttcgtaaaatactttagtgattaggaatcattcttagaataaataggtagatcatcacacatggtctataaggggctgaatggtatgccctcttactagctctctagcctaatctaatgctctattcctgtttattttccttgctcaagtttcactaacttctttcaatttctggaacacaccaaactgccccccatccccaacatatgtgtacacacacacacacacacacacatgcacacacacatgacctttgcctatagcgttttcttttttggaaaagctccttgaccaccaaccaccctcttgcaaccctttcttcagttgtagtttccttgtcattgcaatttcacgttttctggaaagctccttcaaaccatgctccaactcttcgtctagttaactcctatttatccttctgttaatttgttgctttttcagattactttccctgaacttgggcacccaaatttggttaaactcccacagaacatttgtcttatttgtattcctatgtagttgtagtttacatttacatgtttgattacatgattaaggtgtctcttcaatttttttgtttgtttgtttttgagatggagtctcactcctacacccaggctggagtgcagtggcatggccttggctcactgcaacctctgcttcccaggttcaagctattctcctgcctcagcctcccaagtakctgggactacaggtacccacccctatgcccagctaatttttgtatttttagtagagaaggggattcaccgtattggtcaggctggtcttgaactcctgacctaaggcgagccacctgcctcrgcctcccaaagtgctaggatacagacatgagccaccgtgcccagcctatctcttcaaattttgaactacaaaatgcctaagaatagggactgtgtctgcttctacttgccatgctgtccttagttcttgttatagtacctgatacatagtggcaattcagaaaatgtttattgaattaaaaatttattcaatatgtaaatttaaaaaatatcattcttgtgttgtattttctcattcctgtatatattaacaaatacattagttgaactttttgtccttttcaagagatcttatggatcttatgattctttttgggaacctgcttttgtattttggaagttctggatcaataaattcttccttttaccaagatgaaattcccattgctgaagtaaaaacccattttcttttaataaattccaggatctagaaggagtagctggcgactagccttgatacagtatttgtttccttatcagtggaatacactttctaacaactttatttttcctttaattttgattttaggccatcattgagctcagtaaatctgaggatataagagatactgacagcttttctttttttttttttttttggacctgagttgacattaagaatcccacgatagtcctaaatgtggtagcttctctgttgatgtcagtcctacctttcagaaatcatatactaacaagtgctagcctgcatcctctgaagtttctctttctcctttgggctactttaaaaataaggccactcataattaaaatattttctgggattgtaatggtgctttcttagtaggaatgagggggtttcataaggaggttggaagtctctccttctgcacacacaaaaattggcaatctttgtcccctttgacagctggtggcatttttctgaaaagctttcaaatcacagatcatttcttcataatgaaatctgtgtggttcagatacagtgggttgaaattcttatcttatgctgcggtaaaatgctctaatttagattcacaaaaggattctgtaccgtttacttaggagagctgtgcaatttgcccataaaaagactgttcagcaccattagtgcataccataagtgttcagcgacatcatattcattaaacagcatatccttatgcataaccttttcaaccttgaatgtgtttttttctctttgaaaaatgacaaatgacaaaggggtgatagagccccccaagcaacactgttgcctttacagatgaacttgggaattttacttgatcctttctcaggaaaaaaaaaaatcacattcaatcttttctcacctgaggcagttttaattctctctgtagtattctctctatggccaagagattgactgctaacttctaaacttcagtgacatatctttgtacaatagaaaattttgtgagggtaaggatcagaaacttcctcaagtaacttttattaagcacctactatgtcttagatactgttagtcactgagcttagaggtgattatagaatnttaatataatctatagtttctgatctttcatattaaatatcatggatttcctagcttaatcagatagattgggggcaaaaaggagaaaatggggtaagtctgctttttttagagcaagaggggagagtgagtgagaattttaccagtgacaatactttctcttggcaggaacagtgaggaaccctagctttcattccactgctgtaattactctctggtgttcctgtaccctcaatggcctccagtcattgtcccagatctttaaatgtcttaggatagtccctttctaaattctgccctcctttcccttattcgtccaggtatttctcaagcttgtgagatctcttcttgcttccattttaggtacacctgagagcctggcagaaaaagaacggcagctctccaccatgattacccagctgatcagtttacgggagcagctactggcagcgcatgatgaacagaaaaaactggcagcgtcacaaattgagaaacaacggcagcaaatggaccttgctcgccaacagcaagaacaggtgagccctgcaaaaggcactgacgaactggagatgtggaatgtgccaggctcagagagtaatcaaattgattggcttatttgttgtaagctttcctaaaaaataaaaataaaaataagaaaagatggaaaaaaaaaacaaagccttctggaaatctagggtcttcaagaattttgagggaatatgtgtacaaaaaaggcatcatagcaactgggcataactaaaatgatacattgtttcaggtttggatttgattaatgatttggggatgcttattcatatagacatcacatataatccctctgtagcttcactatgagtaagtgacttttctctgggccttattttcctcccagaaaaagggggttctgttccagaaaaactttgggaatcttttagctcattggtgcaatgattttcttcaggtttaaagtccaaagaggtgaccatacatttcagttttccccagatagccctggtataatgcctgttttctagagtaataataccctgcctccttttacttgtgaaagttttcttggtttggatgatacatcacatggtcactatttatagcataggtaagtcattgaatacaaattagtacatcgttcctaaaagtatttgacctgattgacttagaattgagaatgaagaaaaaatagcaaagtttaaatgtatgtcttttaaaaataaatcactttcccaaatgttttttcttgtctcataagagtacattaatctaacaatgatcctatagagtagtccctgatgctttagatcagacagatctaaattaatgtgcagtttttaggaatctgacattattactggaattatcttttcagttaaatgtattttataggagtatatagagcaatatatrctctgttgattttaatgagttgtgatgtctggtattttatatgcttgaatatttgcccacatgtaggaatatggactcagcccctaatggaaaataacataaaggaacactgtaaaaaatcagaagttagaatgtcatttagccatccagagatgacacagtaattaactattgacacttgtgaataagctagcacaaattaatcttgacacatttgcagacgagtgatatctyacagtgaacactttgtaattatatttcaaaatgaaaattaaatgacacttaaaactaggttgtcatgctcaatgaagcgagcatgtagctcaacctattggcaaataaaattcagaatttgagccacatggcgcttatgtaccatacttcactgtgtcaaacccatacgtctagagtggatgatagtaattgcactgtggtgttttggatgcatttctatgcagcactttatcatttaggarggaccatcaatattagatgcctagtggcatttcactggtttgctaagaagaaataaatattcagaggatccagcatctatacctagagctgcagaatgagttgtacatttctgatttgaatatccacaagcagagtgggccatcccaacctgattaaatactatttccactttaagtataaagctctgacaaggaggagtctcatttctcacactgtagtctacattaggggcagctttatcatggcttccagtaggaaccagttgtcatccaaaatcagaaagcaacatttagaagcagactgctatkttgtcatcttgtgctgaatgaaatataatttgggcactaccccctgcataggctaaaacattaaaaaggcttgggaagtatatagcttggaactgatttacactcattttcacttccaacataacccattctagaatactggctttggaagtaggaagaaataggaagaaaagacactcttgacaaaaaggcactactaaacaaagtcctgagtgctctctggctgcttttctctctggcttcctaggttggcagtgagtgtgttctcactaaggatcatctctctggacttcgagctgtagcagctcagcttttgagtcaatagtggcctgatgcctgactcatacttcatagtaaacactattatcctaaggaagctatttgacctcctgagggccagagacagtcatcagtagggcttgcattaaatggttaacatttctttttatagaccagataatgtgtttagatgttgaatttgattgttggatgaaacaaggaaatataaaatttgtatatagatcctgtactatgaaataaacacattgttctcaaaaggataaatggataaatgttaaattacagcttaatttgtttttaaaaatattttgtacatcacatacagcatcaacaaaaaaagctaaagattttttactttttgctgtgtcctttggcactcctttaacaatatttgtaaatgtatcagttctgaaaatctttgtatcaggaaaggttttgccaacatagaccatattaagcaataatacgaagatttttcctgtctttgcttacagattttactttttacatccaaattaagccatttagaaaaatgtagccagagatttttctatctctattctacaaggattcgatttctaaaatcccatgatttccagctgaccagtgcagatataggtgaatagctcacaaatataatagaaggggtagttttcctacagataaagcagagaggtggcacttgtttaaaaatttttcctttcatccatctttctgatttggcctctctcattttataggaactctttcacatagaggtgcrgtaaaagattgttgtaataccaggagaaatacctgaggtaatggcagaggtgtaagcatttcattttaacttaatgaaactttatttctgatagattgcgagacaacagcagcaacttctgcaacagcagcacaaaattaatctcctgcagcaacagatccaggtcagtgtattttattactctcgtctgattatacttagatactttcctccttgaaaatggaatttaaaactctgcagatgtacccctgtcttataaacagcaccaatarggctgttttcaaggatgttgtgcacaattctataattgaatgtaagaaatatggactagatggtggcctaagcattattctctgatgtgatatgtaagcaaaataacccttatcttttttctttttgccttttgcctaacactacttactgggaacctaatggtctcccaggtagcatacagatggtattttttattgccactgaccactttctgttttgtattttaccatgtaatagtactgtagagagaacttacttttaatttacttgttaggactaattggaccaattatgagaaaaatctggaaaaaggctgttaataatttgttccttaacaaatattaattgtattccttctagatgctaaagggaatagagagattaatgagtgatagtttgtcttcaaggagcttacagtctaaaaaggaagaaaaacttgttcctgaataattatgacatggtgtagaaaatccctttttcttatggcaatgtaaaaatatatagatcataattacaatgatctggggaggaaaggtgatggtctgatttcygacattcttttagatacttgatggttaactcaatgaacagctatttgagataggcaaggaaaatggtttccctttccaaatagaaatataggtgtgtgacttctagaaagccctagaataaggaactggctgtctagtgactaatcctyagaaacactgatcacagagttatgcctatcctacggtagactcttgtttcccttgattattggagaacctgctgggatcttgattcaaactagctgggccagtgtattctgaattatrttattacttttcttgaggttaatatcatgcccttctgtattttaaaaaaaaaatcagtagcatgaggtcatagtttactgcaatattctatctcattgatgaataacaaggattttaccttcgatccttgcttcattttgttaatcatactcagtgttccaggtagttactgcacttaaagtactaatttggtatctgaagcagtccctttacctaattggcattttgtccagctattttcagtaggagatcttagccaacttttttgttggtttttgtcgtattcagtattccatattcaagtacacatgttgcaaaataaaaagtccaaatatagatgagttgtaatgtctggcatttttgacagtcagcctttacaattaaatcttggaataatttctcatcctgatatctcttttatgactcatgctgagacccttaattaaataactgtccaggtgttcccttgttctgcccttattagaattttcagtgtagctcctactgctcaggtcaagatttttagcctgtggcttcctacatttttctgtagatccctctgtaggaactcagtaggtgttaaataacatgatcgtttagttctctctgtttctcctatttgtaaagcaggaatggaggaagttccctgaggtgttcttatatcagttaattattgtttttactactgctttataacttacttgtttattcttttctaatatattttacttcttagtccagtgctgtttatactgactggttgtcttcactgatgttttcctgtggcactgagaactccaggtgaayagcaaccaaatcagttcagaatattttaatgaaatayttttagtgtgtattacttatatatgattgtgtagtataaattgactacatctttttcagaaaactacagaacatgatcttaaaatattcattggaatgaacatttggaaacatcaatttgaaaagataggagtaatgtttttcaagttttctaatagaagtttgattgcttttaaaatgtgtggatatttcttgttgtttaattttttaatttaagctaatcagcacttgaacttagcagtataaattataaaataaagatagtcaatgtcagagttacattcactttagaaatataagattctttgtaataagaactcaaattttttaaaaaataagagaaagcaataagacctgtatttatagttcattctgtcctgagctactgctttatggcatatcttgtcagtatttaccttctacatgtgagaccattcaaaaaatttttcaaatgctgaaaaacacgtactccttacacaaaatcacaaaatgtattcatctctgagacttacaaaacaggtatttgacattcagactttctttttttttttttttggaaggggaaagggtaactatattttcaaatatggcttttgaaatttaatcaaatttaagagagagattattgttggattaattttaaatgctttctgagcaaaatatgagacttgagggatgcttcaaacattttttttctatcaaaaaaagaaacactttctcatttgaacccaaaacagaacaaaggataaaacaaaattattaaaggtgaattaaagattattaaatatattaaaaatgaaacttaacttctctttcaaaagcaaatgatgaatacagagacaatttgagcaagtttgacactttttttttctttttatatcttgagtcctagaacctattagcttacatggtcagcaagattaaatcatggcaactggctatgggtcatgagtatgaggtggttgcattcaaaatcgttcctctagtttagaatgctgtcttctgaaatagtactgtttttttccccccaatttgcaagctttaatagaaacaaagggaagagtgcctaacctcttgtaacaaccccacacagacacatctgggtctattataatggaaacaaatgaaaatgaatgaatggcttccacaaattgaaaaacaggatttttcattagaaataggaaaaggcatgattaagatagtattgtaaaagttcccatgtttattttatttgcaattattcagaacttatatgtgcagttaagaacaattttatttatatgtcttccttgaatatattttttaacattattttgccttcgtaaattctaactaaacttttaaatagattcttctaaagccaagtaaaccgtgttggaaaagtaagatgtatgattttgtgaactgtttttatagttttgatgagtccatttttaccttttaataaatcaggataataattataaatgattattaaaatatcactttaatattaggtcttttcggagaatgtttgctttgtaaattcagatccctctgtgctttggggaaaatgatgatttctctaattttttacatgtgaagtaattctcctgatatggagcccaggaaaaaaatagatatttttgatatttccaggacagaaatagcatattttttaccaagtctatggaaagcaaaactaataggtcatggaatatggatctttggagttgggaatattgattcataggctgtaatttcaaaggaaagataactgcttcagtaatttcatcctccccctcccactcattgaactgtagtatcttagctaatatttcgaagcattttacttctgagttatgctaactggtaaacagaattcacttttaattaatttgacagttgtaaacagatcaaagcatgtttacagtattttaatcaatgattaaatataagacaattctaggcaaaacagaaaatattttataaatcctcatttcttgatttttttcacatatttattcatctaacctcatttgaccaggccatggttttgaatctggagattttttttatggatccaatataccacattctttggtttctatagcacatcaataggaacacatttaacgatggaattttgcaactagaactgagtctttgcaaaagaattcagctcattaaaatatctctgtgagaaacttccttttccagggatgaatagtattatccaattatttgtgtctcttcagactccaattttagagttattcaagtggcttatattgtgagctatataggcagtgtcctctcctcacataactaactaaacaacgatctcttaagaatggactggctggatggggttttatttaggcatttggctttctgggcaagggccaatgatttagtcaattcatacacatgtgtcttttttgggtaaaatcgtgagacttgaaatttttagtgccttgttttctttatgattaatgtgcaatattcattgccctcccctcatcatttaacatatgcattagatggcaaactttatttgtagaaggcctgaactaaatgccattgctgcgtctttgcaaatattctttgtcttatctgaaaactttttcttttaaatgttgaaatacatattgcttattttcttttacccaaaccagtgttcattacttcactgaagttgtactctgttcttaagcatatatgattatctttcatatacagtgtttttaattttgattataatatattcctgtgtgctatttatatattttgtgagtctgtatgtttcccacgtggtagagcatcattaaatgtgtgttatcctttcttcctttttggtaaccagaaagatgctaatattatcagcaaggaagtgattgtccttaaacaattaaacataataacttgagatgtcctctcaccttttaaggagatagaccttaccttttgtttccttcaatatgattaactacaggcatttcaggtatctgctgagcagaataaaggactacctttttatgtgaagtagttgtctaaagatcagaaataattgctttgtacattagccttcatgacctgcttgacctagttaattaattttttgctagcataataataatagatatatattggagatatgtttcatcattaagtatctaattgacctctaattttaagagctgcaccttccatttattgtcttttggaaatggctggrgcacccaacagaaaaaccgaggacagtcagaagctgacttcaatcccacatagtccctctgtcttaggttgtatttctttgttatttgtatttatcattgatgaacaaaatgcaattacagtgctcctgttttggctctggcaaatagtcgttttttgtatgttattgatcaggtaatggatctccttccaactttctctgaaaaggactaaataaacctattgaaagtaatttgatacttctattggcactgtacatacatatgatactcccttgcaaagaaatgaggggtataaacaaagcttagaagtctaggattagcccctagcttccgcaagcccttaaaatattttgtaattctatcttcaatcatgaattagccaggaaaaacagaccctctttcctctctctatgtctctgctgtatgctgtttttaattgcccacaggcaggctgttgtgatctttggatgtttaaaaccaagataaaaatgcaaatctaattatttcttttatgtaatctaattaactttaaaagtcatgatagatgctctatagtctgcttcaaacattttaataataaagtttctgggttataaagaataggtaaagctgctataattatgactagcaagggctataacagcaaaaattacaaattcttgttgtgaactaaaactacactttagtttttccacattagtcatgctagactgtttgttatagttggaatgcgcctaaaaataagagaactgaccagatcccaagagctactcaatggaatcagctagttacctgtttttccgagtgtggccttatggcaaagatctcattcagcayaccaaaacctgaaggtgaatctcaaagctttttctgcgctatccttcagttacttcagtctctacacaacccgcccttctctatctgtgcttatctcttagactgcactgtactccccagctctctcccaaaccagtggtactaaaaattcagggaaaccagtctctgcttctttccggaattaaagtggaagagtgccttacctcttcagaggcagagtgaggtgcagcagagtgggccagatgttccaggtgaggccagcatgtgacattacrtaatactgaataggaaaatgtctctcttctattttttttttccttgatccttctcattatattgagggctcagtttaatgttagtctttaatactcttctagtatgtactaaaatcagagagagagagagagaatgagagagagagagagagagagagagagatcatcttattctcagagcctttggatgcaatatggcagtcagctggaatttaaataaatttaatgttttcctttacatggttatctggttagcttctatttacggcaggtgattttaattttctatttgaagtataatatgaagtttccttttgaagtgtatatacaccaaaagaaaaagtcaaattaaaatcttaagcaaatagtaattaggtacttggatatgacaaaattatgaagatagttctctaatggaattttggggaacccttgaaagagtactacagtaagagttgtattaaacattccccctctaccctgccagcactttcacagaatgttaaactcgaaaacgtcatcatgattctcattcactggatagagggagaataggtagctatccatgttgaagacaatatagtaagtttatcataagccatactttaaaataaccctgagattatgtttttccaccttttggggaattaaaatgtcctttctatgaagtattggtgataataggtggtatgtgctttctttgtttttcaatagttttatttggtaaaataaaaagttcccaactatatgtaagtctccacttttgcttgtctttgaaattttgctgatctatgatatataaaacctttgggcatgcttaatctagtccaaagcctttagattacacgaggaaactgaggtatagaccagaggcttgtctgagcttaaaaagcaagtattatcagagccacaaggggaacccaggtttcttgatgcctgatggagcactgtttccagtatttcagatcctttctccatttgccctttttgtgacttgaataaatcttactgcacttcagtttcctagtttacaaaatgtgtctaataatacctaacatctaaaatgtcattacattctctttatccttaaatagaaaaaatagaaaatttgccactagactctctctacccttagaactactatagctgtgggtatatacctacaaggcaagagataaaaagaatataattggaatctttttgtagtgcaatgggaggtgtgtatatggctgggtgactcttttggtgtttacatatgaaccttttagacagttaattatactacttcctgagggctttaacgtgatgtgtcactatactgagggtcagacacctttaatattaataacttttttttataactaccttcttcatctgatgaatgtgagcagtgagtgacagcattccatgctagtggttctcaaccttggttgtcccttgtaatcacttggaatcttgttaaaaatactgatgcctatcccaaagatttttatttaattggtcttggatacagtctgagcatggagagtattgaaaagtttatagatgattctagtgggtaatcagaatggaaaaatactgctctatacagggtaatgaagattaaatgattaaaggttaatgctaagttgtttagatttaggttgaatctctctctctctctctctctgtctcatccatccatccatccatccatccatccatccatccatccgtccgtccgtctgtccgtccatccatccatcctgagggttggagtataccttaaatagttcatgatgagttaaaatatacttttcattttggtcatagctgttttacttactagctagaaagcttttaatggaccatggtttaaacaatttaaataaatttagttagtttttctaataacttgatttttatttgtctatgaggatattggcaagctaaaattgtatagacatcagaaggtctgtgtcttttggagaaggtgtatgaaaaaaatgaagcacaaaataagacaaaaataagacaaaaaagttagaaaataaaatctcagatgccatttggcttttaactttctaaacagaataaattttaacacaaacatcaacccattttttaaaagtgttttttaaaactttaagacatagaaaaaatcttgcatcctgacatatgtaaggaatgtatgactctgaatctacttttaagtaaatttgtacatataaacaaaagatgtagagaataagatgtgttatttcggaatgtatgtaatttaaaaattttatagaaccagtgcaggtattggagataaataaattagggtttaaataacaattccactacctgttagcgctgtagtctgttttgttacttagtagctgtaagacaagttacttaatgtctctcagcctgtatttcctaattcctaaagataattacaataccttacagtagctttgagataattatataaaacccctagtaattgcttaagcataatacataccactatcattgttgtttttgttcttgtatgactaggtataggaataatttcagagtttctaatagagaaaccttcatgtacatattctacatgtgcacatatacacacatttgtatctatacacacatgcatatttagaacccacaaattagtgatgtgaatatagaataatcaatgtgtaggtactataatcaattattatcaccatgatagtacagaggaaaataaagtgcaacaattttccctggctgccaaacgagagcttttcaactgtcagtgagtgagagtaaggtttgtcaggcactcagaaatggttgaccaagtattagagcagcttggagattgtataaaagagagcataacattttattttcaaaaaacagagtcaaattctcacctctcagactaaaatgggctttgctattagattcatagtgcttgtgaagttagaaggatggtaaatgaacctttccaatttattttatagctttttaaagacagttgaaattatgtgttttagctgcacaaaatgcaaaagtccttcttgctgaaaataaagttgttcatataaatcttatgtatgccatctcctgtaagtcaagcatttgcctagcttttgtgaattatgtctatacttagaatttaagaagttaaacagtatgcataccagacttgagagatgggaaataaaaattgatatactatgtgacacttgatatagcacagggaaatatcttttaaatgctgaggggatgtactgacataaccatttttaattcacatatagtaacttcccactcaaagttattaatgttagagtcatggatttttacttgtacaaaataacagcaaataaatgatgcaaaaagtatagtatctcctgtaagaagctgaattamttttatccactgctcaatccattaagaaaatgttaaagttgtaatatcaaacaatgaaagttaaggaattcatagtcagaattaagggttgagtacatcctcagtcaggttgtagtctggactctaacttttgatacatgtatgtttcagtggaaaatttttctcttaaaatgtctgcagttgagttttctgcagtggcttcataacttcaactgtgtttaaaatgctataaaataaattggaaaggttcatttaccatccttctaacttcacaagcactatggatctaatagcaaagcccatttttgtctgagaggtgagaatttgactctccactcatggacaaaaaaaaaaaaaaaagaaacaaaggaaaggttaaaaattaactgggtgtgatggcatgcatctgtagtcctagctacttgggaggctgaggtagggggatctcttgagcacaggagttttaggctgcattgagctatgatcactgcactccatcctgggctatggagaaagactctgtctctaaatcaataatgaaataaaataaataaataatataaaaatttcaacttttttaatatacaaaagccatatatgttagaaatttaagaaaaaactacagaaaaaatgtctttgagtagtaaagttattttgactacttttcttgctctagttttttagttttaaaacttcttttctagtaatttttcttttccagtggtttctaaataaaaaatttactagtagtttttcttgtctagtagtttctttaaaaaaaacaaacacttttctagtagtttaaaaaaaaaaaacaaaaaaactaaaaacccaaagcaagaaaattaatacaaataattttaatactcaaagacatttgccctaaacatcatatacttaaccacttgatatatagagtgtattacaaatttgggtctctactgtcagtcttactgagaaggaaagatactgcattgatatggaggccaaggtcctaaacatagagcttaggttacttcttctatggaatcaacaatggtctgaaacctccctcccaaaagaaaccccccaggagcttagaagttccaaggatatactccagttctaagatggagtccatgagagggccctctcaaagaccagtggacctaacaatccacattggaactaaatcagaaaactttaacagaaaagcagttgtgtggatgccaacttcaagagcctaacttcacttttctatgtaggcatagatcttgccaatgctttcagtctgttttactgatatctatacatgtttctaactcttatcctcccaaccagcttttcctggaacacagtaaattccatagacttatacgtcctctttggctctgggaggccacaatttcaagcccaggaaaaaaaaggcatggagatgataactgatctactctcagcagaagttgttcttctcactcttatgtaaagtctgcagccccaacttggagacgaaatagtattagaacaatgacagaaagatgattagattagttgacagaaagtagcctagacttgaactcaggatgtctatgcctgcctagtctttgttctgctagcaactacctgtcctgcagcaaatgacttttctgccttttcattttccatatatttgaagaaggattattgttcaggattatcactgaagttccttgcaactctggcctctgattctagatgacaggaattgactctgttactttaaaaaaggagagcagtagatagtcktgcttaggaagctcaaaggcaaacgtcaagtttggccatagcataagacgtgtcctcttaggaggatgtttccatttcaaaccattgaagggtctggaatgatgagatcaaattcaggtttcctttgtgaagtattgtgatggcttgtaatgcttgccccatgaaataatggctgtaggtgatttttagaaaaatacatttaagaagagggcctgtaaaggcctgctttcagggaacagcaaacacatttctgcagccagtgacaaactcctgacattacggctatataatggaaagagtgacacaaacttaattttagtgttgcaagtgaaatatcataatttttggaaacaaatccttatagctttgctaaggtattaattgcaggaaattactgcatatccttttgaagtattatgtcagtggcatatatagcacataacaccttttcctagtctctcttgttttcaccccaagtgttgcattttcatttgaaaagagatgtgttaagtggctagaactttgtctaactgtgggggtggtgttgagtgtcgggggtgggttcaggcagtctcaaaacacttaagctgtgaagggagacttctcagttatgctttctagaactgggtctcctgcttgaaggataatgttgatatggatattcttttggccatttcttcatttctaacttgttaagtttcaatttctagtcccagtacattttccaactacaatttattgggtcgcaggatttaaaaatgagagaatttcatttctgatgtgtggtagagcttaatacggttttctgatttcctcccattttgtttgtagtaaatagggtaattactcactaaaattctaatatctttcagggctttagggatgaatccaaaacagaaccatataatgttttatttaagcaaatccatgttcttattaggcagttcaccttaatgtcattttttataaataaactttgttttattttttcaagggttatttaatttattttgttgtactaccacatcctgacatctgcctttgctaaggcctgcaggatgtgatttgtggtttaaaatttaaaaaaagatattatttaaaaatgataaatcatttgggatacaaaaatatgaatgtaaaagagtctgatgtactctatttcattttttaataaccagacacgtgtaccgttctgtgtttgtacagagcatttgtgccagttatgcatctgattaatatctaactagatatgaatgaaaccaattgtggagaaactactacaatactggcttcttggactgtttatgttccccattaattgcagggctttaccatataaccattgggtagatctggttttacttatcaaatccagatctgctttttctccccctgctgagtagggtgaagtttcttgtgctaccagcttcttattattttgggggttcacagcatcttgaggattgaagctgttagccctggaactcccagtgtttctgtggaaagattatctttgctagagtaactccttggtaagtttgctctacatgcaacacaatcaggttaaacagcattttacttttaaatgaagtatttattttaataattatggacaaatactcatttctccacagaccttccttactctactttggataagggtaggtctaaactggagggcttttaaagtctggtctttaatcttttcccatagccttcatgtttttccgtagggggagaaataggtgggaaatgaagcaggggacagtataggattgatttgtacataaatgataatgtggtcttttttcaaaagagcaccatattttctttggaaatgagaatgcacaaagggtattttagttgggcttataagaagaccatttcccttgcytagttaaaagagctgttacgcagtagttttaatctccaccttgacagaacatgtgcccctgtgttccaaagggacaaaatgtattgaatttgaagaggacagcaagtccgtcccattcgggtccttaaccatttcagttttgccagggctagcttccaaagctaggtttaaaagcagctgggagwtgtaccgtcactttacaaaatgagtattctaattattaaccataaaatgtgggaaagatatctggcaagaaatctaaaaagataagcttcttcttttatgccgactggggacattctcattatgtttttgactaaaaaagtcattgcattctgaaaaaaatgaatgatagaaaggttttttttttttaagactaagtagctgtgaagttgtataagaaagagaaaacactttgaaaagtggttagagctctcatgtattaagcacagcagatgaaatgatttattgggttttatacacattctgtaaaggttttatacacattgctaacagaatgagtagcagcctctgggagctgaacaggccccagggactagtctttgttcctctggtcttgacaggcatgtgtctctgttaaatgagggcttaatttctctcatatgtgaacaatttcgaagcccaacaaagacagccaggactggagctatttaaaagaaccaacacaggaggaagcattcttgaagaaaggggatgctaaaaggctaattactcacgatggcttagcaactattttattttttccctaagcaaggtttattaacatgaatctaccactttttttttttttacataaacacacattaaaattacaagggtgtattttaattttttgtgaaatagccatttgctgatctctgttcattgaaaagaggtgcccccatcagcacctcatggtggtgtatatcatggaatattaattcactagagggggaggggaaagactaatatactttggatcttttctgtctcaagtggaaggaatttaaactatttactaagcagcatccttggcaacactgtgaatcctttctttagacagtaattgcttaaaatatggagggaatctttatttcaacattttctgtgagtgtttggctatgattctcttagtttgtttcaatttctagaagaaaatccatctgttaaaggggtatatgtaagaggttacaggtatgtctctactttcatcactcatattttttaaaaaagactttgtaaacttgatcattttccctttcaacttgtattataatcctcattagccatttatcttaatttttgactactgatatttaaatttctgtacttttcctttcaagcttagtaacttcttttagcaggtaatgatctataaacatttaaatgtatttgtgctgcaacttttatatcatattatattataatgataggactacttaaatgcaaacaataattgtcttctgattcatctattttgtatggttttaaagcaggatgtaccagttatttgaattatttacaaagaagcattatctataaatgaagggctcttccaactctaaacttctatgttttaagaataaaaatggatctgaaataaaataaatgacataattttagagtgtttacaataaatttgttaaaaattccccaaatattacaagcttacattttgactttttaatatagaaaaattaggaaatcctcaaatatggaagtttggcacaaagtcagacacgcaacagtatcatttcatgggaacaacattctgctgtacatggtagctgtgtgtggcatgatagaaaaggcgaagaaattgttgatttgatttgtaatgatggacagctgaccgataacttggttacatctcattatcaaagtggtctttgtgaatgaatcagatttttcatatgctattagcagttgtagcaaaaaaaccataatttccacctgcatgcctatttctactagagtataaataacttctgaaagtgtctgagccttgtgtacagccatgatgacctaactctgaaggatatggggtggtatctttacttagaatgtgaaatggtgactatgtgacttggagaagaaaaaagtaaaagccatttcctcccaggtgcttttccttagcatccttgctttctacccagaaatatagtggtttccataagaaagtatattttagtagaaataacatgttccaaaccacttaaactaatgtctaagctatatttgttccagaattgaagtgcatctgaatatgagaaacagtagggacttcagaaatgagagtcacaaaaaattctaggacccttatttatgacatgaattaattaggttaagcttgctttccctttattatttaagatgttatccaaaatgaacaatatcatttctttataaacctgcctctatttttatacttcctgttcttataaatgacgtcatcactccaaatcatatttgatacctatttttcctttatgcatcatagaattgccaattctagtctaatttacctcaaaatacctcttatcacattagattcatgttatgtcatgccaaaactgctgaaacagtctgaaattgtctcccccactttagtttgtccctttccaatttatatgtctattccagaatattcttcctaaagtcaacttctcattgtgtttcttttctgttgagatatctccaatggtgtcctattgactatgattttgatttgacaaactttcattaagcagttgttatgtttctgatactcctttggtctttgaggatatggcaatctacaaaaatccctgctctgctaagtttacattccactgtggggaggcaggcattaaatagataagtaaaattactgcacactacaagaactgctatggagaaaaagcagggaaggaggaaagggaatgggaaagaggtactgcaattttaaatagggtgtrtgggtacgtacttaagggagaaggtagtatttaagaaaagacccacaggaatggaagaagcaagtcatacgcatatcaggagaaagatccttccagggcagaggaaacagcagagcatgctagctgatgggggcttgctagctttagctaaggagcatcagggacagtatggctggccagggtaggggtaattttagtgagtgaacgaaagagaaaagagtaggaaatgagaacacagatgatcttttacatcgttgtaaggactttagtcttcaaatgggatgggagaccattggaaagaacggcgtgccctgacttgggttttgacaggctcattctggctactgtgttgcaattagacgaaagggtggaagggtagaaggagggagaccatgagaaggcattttaggcaaagtgttggtaacttggaccaggttaatagtgagaaktcaattctagatatattgtaagagcaaagccaacgagatttagagtgaaaaggagagaggaaagtcaaggattttgacctaagcaactagaaaaatggagttgacattcactgagattctgccattcactggaaaagctgtaagaagaacagatatcagcagtgagtgagggtctggaagttggagggagaatatcaaaagtttagtgttgaactattttgttgaaatacttattagagatccgtttggagatattgagtaagcagtaggacatacatgactggaattcagaggacagataaggactgaaaatgtacatttgagagtgtcaatgtatgcgtagttttcaaagttcagtgtttttagcctaatgttcatggccctccataacatggttcctactctcagtaaagctatttctagctttactttgtactagttaataaacttgtctgtgtataattttcagaacacgactcatactttcacatctccaaatcagttgtcataatgttttttctacttggaatacccattttcctcacatttatctttgtctttttaaagcctagaatttcattatggcctggttccatgaagccttcactgatcaccaccactgctttcccctgactcagtcaaggttatctctttctcttctgagcttccacagtcccttgggccttttaaatagcacatactacatgcattgtattttagctgttcattcatgtcttgtccctcctacaagatcatagcctacctgaagtctgaggtcgtattcatttttgtattcccaacatgcctagtttgatactttgcacatgggagatgttgttgaattgaatagttgaaatcttaaatcattttaatggacaaagaaggaaacattcaaagttatttttttcttccattatatgttcatcacttattgaagcaaatattgcagaagcacacatatgaaacaaattgtactaaaatatttagttaatagtgctatgaattaaacagaatgttggaaacttaggatttggtttgatcttttgactgaggtaaagtctatccaattcggagatgtttgctgattaatcagctgttaaattcctacttgattaaagttggtaatgtgggtgaaataaacagtccatagttggttcattaaaaaaaaatcacttaaattcctttttgggttgactctgatcttaattaaaatgcctagaaagagcaaattggactgtatacatttatactacagtttcattgtcctwcatttctatctctaaattagtgaataatttgtatttctaagaagggctcaaatacatagctaatattgagtacttattatatactagggacttttataagtcctttacaaatattacctccttaaatgctatgtatttagtcttttaggatttttttttttttttgagacagagtcttgctctgttgcccaggctgtagtgcagtggcgccatcttggctcactgcaacctccacctcccaggttcaagcgattctcatgtctcagcctcctgagtagctgagattacaggcacatgccaccatgcctggctaatttttgtacttttagtagagacagggtttcaccatgttggccaggctggtcttgaactcctgacctcaagtgatctgcccgccttggcctcccaaagtgctgggattacaggtgtgagccactgcacctggcctaggattcgtcatttagcattactgaactttactatagtttttgaaaatcagtaatgctatgtagttccttggggaaacttcagaaaggaatagtaagggatatagtttttacagccttagtttactgactggtatctttttaagcattttaacttctataattcttatgtatattatgttaaaataagaaatcttgagagttgtagatttagttcaattctttaaacatttaagtcccttagttcttagctaaaggtaccaaggtgaaaaagataatgtctctgcctttaagaaactcacagtttagtaagagagacatttgagcaataatcatactaagtaaaatgatttttaatttagtaaaattttaatgagctttgttgactgatcatagattaagtattttagctctatcaacatcaagggtatatcccttaaatgcgatggtagtatttatggctttcaagttagtatttgtggcttgcaaataccaagtagaacagtaacacttgctggaactcctgagaaaatatactgaaaatcattcctctaaaagtagatttttaaagaactgctttactatttgttattttagtaatcaacaataggaaaagctgcagttagcaatatagataaaaagaaccagttaatttcacagccttaaagcatatctgctctgtgtaagaagactgaaattagctatatgaagtcaatcaatacaggaaatatgagacatactgttgtctctctrtggactttcttttttctttctttctttctttttttttttttttgataccaagtctcgctctgttgctcaggctggagtgcagtggtgcgatctcggctcaccacctttcgcctcccaggttcaagcgattctcctgccttagcctcccaagtagctgggattacaggtgcacaccactacccctggctaatttcttttgtagtttagtagagacggggttttactatgttggccaggctggtctcaacccctgacctcgtgatccgcccgcctcggcctcccaaattgctgggattacaggcgtgagccactgtgcccggccctctccatgaactttcaaaggagccagagagacaaaatgtccatgtattttaaaatgcgagaacagttgcagaacatcttgaaaacaagtacaaaaataattattataaactgaacagttaaatactgaagatccactgattctgatggaggaaagtgaaatggtagacaagcaagacactactttacatacattttatttgctttaaattgaacatggtatcatacagcacttttaagcaaggtatagttaatgtctatttaagaatttctaggctgggcatggtggctcacccctgtaatcctaacactgtggaaagtgaaggcaggaagattgcttgagcccaggagtttgagaccagcctgggcaacatagtgagaccttcatctctacaaaaaggaattaaaattacccaagcatggtggtgctactgggtaggctgaggtgggatcacttgagcctgggagtttgaagctgcagtgagccaaaatcatgccacagctctccaaactgggtgacagagcgagaccttgcctcaaaaacaaaacaaaacaaaacacctgaaaaagaatttctagaggctcagctcttctttgtctcgcaacctgtctctttcagaaataaagggccttaagtagaactagccctggttccatggttgagttacaaatatacctgtcaatgccccaacttttcatagaagacaaaatacataccacatgattaactgcagttcacaggaaccacagaggaagatagtgcaggttgctatcttgcttggattgccattccttttgggttaggcttagaagccaaaatcatgtagcgtcaaggccccagaagaatgctttaacctataacttaggactttagtcaagatttattagcaagatttgtttttcactttaagggagagatacttttcatcctcaaacttgatttggaaagtatgtgtgggaagagtttgttttcttcccctccagattttgtttttcctgagatattggctgagaaagcctggtttagaccattgtttgatgaatgctacctaaccttctaaaaagttaggattatacattctatcagtagttgcaatcctttccacatgtttattttctataaatataattttgttatccctttaaataaattcatttataaaaggcatagtaaaaatctataggatcttaaactgttttgggtgaaagggaccttgagaacttagatcactgactttcaacttttttcagaccaaccacagtaagaagttcatttcacatcactacccaatacatgcatatagcacatacatacacatgtgtgtataacagaaacagaaatttcattaaatgagacttgtcttacaacatgtaatgttctctgtatgagatattttctttttatcttccttttttattttctcttccctcctcttttttcatactcttatctgatccttttatttttcttttcccctttttacactatctttccactctttttcattcttttttattatcttgtctctctcatctttattcaccctactctcttctttctttaatctcattctacccatatactccttcctctttcttctcacttttcttccttttttctttcccttttttcattttccctattctattctatttttaaaaagccaactctgtccttctaattggtcacaaccacaaagcgtggaaaatactgactcagttcaaaccactcattttacacttaagaaaaccaaggctgttaaagatggactatcatctgtttaaggggtatattaggctattcttgaattgatataaataaatactcgagactgggtaatttataaagaaaaggctcatggttctgcaggctgtacagaaagcaaggcactgggcatctgcttggctttttatgaagcctcaggaaacttacaatcatgacggaagtcaaaggtggagctggcaactcacatgggaaagcaggagcaagagagtgtgagggggagatgccacacacttttaaatgaccagatttcatgagaactcactattgtgaagccagcaccaagccacgtgggatccacacccatgatccaaacacctctcaccaggccctgcctccaacgttgggaattataattcaacatgagatttgggtggggacaaatatccaaactatatcaagggtattgcttgtccaagatcacatgttatgtcctgaaaacatctagttactgacagagttggttttgtaatatcggactttaaaggtcttcaaagaaataaaaatattctgacctatatggatatcttaatattctgaacctaattctttctgttttgaaggatataagatgcagctagttgtaattataagcaagaatgtctgggtaaaaatttggaaatttccacagatttctagtttgatgaagttgctatccatcatcctgaacttaaagttttgatttttccaagcaaggaacaattattacagttgtatgtaaaaattgaaagacttgaaaactctattatatataattgcacagaatccttgcattaaatttaggacaaggaagaaacagaatagtctattaatttattttcatagttccaggaagggataagagagtgaggaccataaacaaccagaatctgataaaatatccttaactttagcctcctgccatgagttagtatgttggaacagtgaatggcagagaaacacactaaggcaaggccaagtgagaacaagaaaatgtctgcaattcactttttcagtaagtactaccatgtgccaggttctagttatgtcaaaggacagaagaaaaaagaaaaaygagaaaacttagcaccaggagtgttatatggtagagatccgacttgactatgaggagcagctttttgtctcagcaggagttttgtggcgctagtaaaggaggtcagcatttttcctttgtcctgcttttgtctgttcagaatcccactctttgtgcccttttcagaatgtgcattggatgtgatttttgttgttgtaatttggtttccattactactttaaataaacttgacataatatttggattaggggaacagctactagagcctattagctactaaaataattcttatgtctaagacwatatatatatatatacaagactatatatatgactttatacataatcttaaacataagacatatatatctgatatatatatatatatatcaaattcattgtcaaatcttaagtgttacagtcctcacacaatccaagaataaagagaaaataaagaaataggtgtactaatgttgtgctggagccaactcacactggctcataagaaccaactgtgtgtatcttttcccaacttcttgtccagtgacatcatgtttataggttgaaatcaaccatggtggattgaaatcaaccatttacaccatggaaactggcaaatgctccatatcaccctcccccactttttttttgaaagctgatttaccagcattcaactgggtgtgataaagtacagaaacattaaaaagctaagcaatcaaatatttaaatcattgattcttgaactaaagtggctgcatgttatttaactagtatcatcggttttggatcaagagtttaaaactttcttgtagtttttttgagaatttggaattaattgaagaattttaaaaagagagctcagttccaaaaatgttttagtaacttagaaatattttaaagtcattcatggtcagaaataattagccccctgggctcactgtgctgcttttgtaggcttcaggaaagaagaaaaatttagaagtctgaacagaatctagtttaagaaaatgaaacattcttaaattacattttatcctcaatccataatttctgacagtgtattttctgtgttctttgacaggcttatagactactctgctttaacataaaggattattattttttcaccttcatgttaaaaaccacattagcctccaccccgtaaagtaattttacaacacttagcataatgccacaaactggtatttaagataagtcattatggtatatatgggcatgtgttatccagacacatcactaaggatgcacttgcttcccagccacagaaatactgtaaaacatacagcttccatctgtcagctcctgtagtttgcctgagctgcagagagccacttaaccccaggtcatatccttcccaggctctcccatttgagtgaaggacatggatgtgaagtttgggcctttcaggtttgaaattagacactgacttcagggcttcctgctgagttggatgaagtattcttaggccaatactatagttcaatttcttcctctgcccaatcttgtcttcttctctttcctgtttacaagtgttgttccctagtaaatatcttgtaccttaaaccgtaaacctatcttgtagcttttagagaaccccatctgcagcagccttgtacgttacattaatgcaatatgttagtattatgctaaggcaattttatcaggtcttgccaataccattgaggcctgcatttctggtatgttagtcccctttccgagtttcccaccccatgactttgtctacggcagaactgttatgaaaaaatctgctttagaaattttgctccatgttttagtacttgtcctccaaattctgccactttacatacatttggtaataatgaagtttcacctacctaatgttctgttgcattaagtagatttttataggtagaaacagacttatcaaaagtctgattgttctgcaagccaataaatgtcaatagaatggagactattttattagtaaatgtgtatgttacaaactttattacattttaaatttaacccaaaattcccctggtcaaaaatttaaaagattccaaagttgtgtgcatagttattaggttactaaaatctgtaggtatatattttagattttatattactcagaatactgcataaaggtctttttaccttattttttctatcagttcacaagttcacatcatctaatatttctctgtcaaattacctactgatactataaggccaaataaaaatattaaagggaggaaacaaagtattttttaaaacyaaacaccaatttattttcacgtaactgttttggagagctgtatgaaaatgttgagaaataaggtaggtagaaaagataagaaatataagaaacagtaatatttatcctaaagtcttgaatcctcaaatgaactgatctttagcgttctcatgctagtgttaatttgtgtctaagttagaggaggggataggaaaagaggatttaaacacagctgggagcattaagtcattttggataaggaattaatattagataattttggctaacagcagaaaaactaataaacagtttgatgatagtattctcttaaaagtgtttatttctgtagtatcattggtagatatgatttaggtataaggtgagcttattgggactatttgcattgtctttctcctgcaaagaaaggagatggaaaatggtgaaaataataatttcaaagtctggctctgctatctatttggcatgtgatcttggatgaatcatttaacctttgtgagacttttctgtaaaaagataacaaacacacagatacacacacacacacacacacacacacacacacctgtaacttcaagcacataggactaatgcaagaattattagagttaatgtgtagagaaatactttggcaaatataaattgaaaaagtgtgtagtcataataataatgatgagtcagttcacatagagcaaaattttatatcaattcccatatcacattcaccaagatcttttttctgaattcctaaaagaacacccaggaaagccacaagcagataagaggaatttttttattactcctggaagccttgcctacaatttcttcattttgcctgggtgccccctctccacacatattcatgtgcatacacatttagtcatcatttgtgttaccaataatatgaagaaacaggacatttatcatatgatttttatatataaattacagttgagataaagataagtkgactcttgggagatgtgggaaaagaaatctattaatgagattcactaattgttgttgttgcattttggcatcagtttcattttgaacagaagagaacaagttgtacctgggagtcataccctacgaaagccacaagaacataatatatacaccaaggagtatgatggcttttggaaatactagctttgagaaggtacagaaattggaaggaactaaggggggatttgagaggagctggtggcacagtgtctagatgcattgaaagtatccaagaatgaagagatgtgtttaatttcagcatagagattaactcaacaatttttgaattgaatgagtttaataaagttttcttattaaatttctactagtctttgggtactatgctggaaacaagaataaaaaaagaaagataaattacttatctttggaagytcacagtctagtaaatggcaacaatataatgtgctaagtgttatggtagatatattcactgactgccatagaagtgcagaggaagagcatttaatcccaattgatagagtaagggaggcttgctcaaagaagtgacatttgatatgaatctgaattttgaagtaggagaaggaatgtgaaccaggatggaaggtgtccaggcagagagaagagtctgaacaaagattcatagagatgaagaacattgcatrttagggaactacaaataaattcatttctcagtaaggctggaatgaagtgaacaagtacaagtgtggcaaaatgaagctagagtatagctatgcaysagatattgaaggaccttttatgaccaattaagaacaatagtttaaaggatataagcaagagaatgggatgacatttgcctttcagaaagatcactctgatgagagtgtggagaatatctatttggtatgtgatcttggatgaatcatttaaccaaatgattaaccaaatctgggggacagaacatgtaaatacaggatgataatcaggtttggaggactgggtgaggtgaagggttttatttttgacatgctgaattatccaggtagatatacttactagatgttggatatataggtttgaaacttgtaaattgagtctgagttagaaatacagatattggatattaaagactggataggatttggatattagccccctcaaaagaggaggctaaaagtagagacaaggagaacatttgaggtactattgaagtaatccaaaagggaagaaatgacagaatctcggctaaggaggtataagtaggaatagagatgaggagatgggtttgtgtgatgttgaggaaataaatctatagaattcatgattaattggatttagctaagaagaaatttaagcaaactcccacatttctgcattggttsacagttgacacctctgttcaacaggataggtgtttatttaattacacaaatatttaccaatgataaatcactgctcattatcagtgagcagtgataatacactaaggaacaaaatggacaaagtttgggaagatagagactgtaaacaaatagataaatatcatgtagtgataaattctatgaagaaaaataggttaaggataagtaagaatatagagtgatgatagttacacatttatagagctcagagaggcctccttttgagtaaatgatttgaataaattgaatgcaggagacatggatattagggtaaaaaaaagtattccagggagaaggaacagaattacaaagtatgtgaagtgggagtgtgcttggcatgttttaggtgtagccaggaggccagtaaagatggagtagaaagagcaaggggaagtggtatgtggtgaagtcagagatgtattggtggacagatcatgtaaatacaggatgatgatcaggtttggaggactgggtgagaagaagggttttatttttgacatgctgaattattcaggtagatatacctaccagatgttggatatataagtttgaaacttggaaatggagtctgggttagaaatacagatttaggaatcattatcaggtggataataatgagtttgcctagaaatatgagagtgagaagagggtagagagcagaattttcggaaatactaacatttaaagggtggagtaatagagaaatgggaacatgtgatggagattaagaaggagaggcagtagcaaagggacccacagactgatccatatatgttcagctctggaaggttcaagcatgagatatttattaagcatctataataagcattgcactgtgaatatgagtgcaataggtctcagaatgatgtggtgatagggctcttaraaatcatctatttaaacccaatcattttgtatttgagggaactgtgaccagaaggcaaagtgacatgctctaggccacacagtttcatagtgagagagataggacatcaatctaaatcactggaactgtcccctttacacactgaactcagagaaacaaaaagcatacaagattgggataattttaaagaactttctggaactttggtcttaaagactggatgggatttggatattcagggagaagggaagggcaayatgagagtaaatattaaagtgaagatgtgataacgagcttggagtgtatagcctatgaaaagatgtcctatggtagagtttttattagtgaataagggaaataaatttggaaactttggttagaayaaagattgtagatttgatggcatgggaaagcaatagagactttggaactagttcacctttaataaaagcatgttgtggaagaggaagatacactagactgccactaagtatgtgttaacataatagctaatgattcactatgtactagatactgtaatacatgccttatgtattatattactcaattgacacaataatactgtttgccactgagaaaatggaggcttaacagaggttaaacaacttgcccaaggcatcacaataagtagcctagccaagattctaatctaattaacagaaaacacttatatagtgtttactgtatgttagacactattctaaggctctagatacctcaatccattgaattcttacaatagcccattgaggtaggtaatattattcccttttatagatcacaaaagtgaagcatggagaggttaaataatttgtccaaggtcatacagttaataagtggaagacctcgaattcagacttagtctggctctaggatgtgtgctcttaaccactacactctgctgcctctctttctatgagaatctagagccctggatcctaaccactatgtgatgtatctttcagagcagaggttttgattgaaaaacctgtagactcatttgccaagttgggaatttgaacatagagatagagtggcctgggaaataatttctaaagaaaaagaaaactttttttttttttctgacaatcagtctgacccacactccacagttaagcaaagagggtagttcaaggaccacctacagaaaagaaggagcgatagtcttaaaaccggaaatttaccaggttcacgacttgtaaatgaggaatgcatgaataagaactaaaatatgtgcagcccaaactgccccactacaaatatttgaacactccctgaaggactggttgcccaggaaatgcctggttacaaactcaaggtgcaaatttatcaaggtagatagatgcctgtgtgctagtctgtggttgtttgtacaaagttatacttggggaaatagaaacaggaaactttgatgtgtatattacaataattcttattttgtctttatgtaaagacaaaaagttgcatttttttttgtaagcaaatattaaacggctttaaaaaatcagttagactggttgaatgattcagaagaccactgtacttaatttaattcggagacaggtgattagaaaagatctggctgagggttgaagaggagtcacttaaaaggcaaaatgggagcacaatagagcagaaagaagcatcaatagctgatttctgtaggttccatacaatttaaaataaggagttttaatatggtaaaaagaatactgcacagggataagtggcgtaaaggaaaaattacataaaaaatagatttctgtaatttgtcgcagcatgttaattaggggggttattattctattgtaatgattgttagcaaatgtttcctccatttatttttccctttacactgtccaattgtgcttcttacttttttttcatgtatttacaaactctagttaggatcctgattacggcatagttccttgataatattaagatatgtaaggtatcttcattgttggcctcaggctatctttgctatgacttgcatttgtccaacgtcaaaacataggaaacaggtaataaagcttttggtggtatccagccactgtaatgaagacaggaatgtgatttgagctgggaggaataaattgccatcttacttcacttttatattcctttttattatcaggcagcattacccaaagccatgggttttgttttcagaaaagtagaacttagaattatgcttggtttaggattaattaataagattgtgtggtactctccagagaaaagaagttaaacttcattatatctcaatttggattttttttttatttttgacttttaaaaatgcttagattttcctcagtattttatcaatagtgtgtaagctggaaaacttgagtttgagatcacatayctgtctcactagtctattcacttctgtgggcatttcggcagaagtggcaactggaagttgtaagcatggttttgggcagggagaccagagttcgatggtcattactgccaattatactctgagacacaaagagataggttgagtctgttggaccccagtgggtttcagtcttatgtgttcagttgctcatattgtgcttagtgagtggtatgggtttttattgtattttaggaggtaactggaagagatcttttatttatttgtctaaccagtcctatcagaggtagttaaccctgtttttgataggcttagtaaaacttactctacatatccctgtgcaatactgctttgtaggatgacatatcgccaaacaaatttgggacaactatcagttcacaaattttttccctttcccaaggctgtgactttttttccttaaaaaagtaactctaggccaggtgcagtgactcctgcctgtaatcccaacacttttggaggctgagatgggtggatcacttgaggttaggagtttgagaccagcctggccaacatggtaaaccccatctctactaaaaaatacaaaatacaaaaaattgtctgggcatggtggctcatgcctgtaatcccagcactttgggaggctgaggtgggtggatcacaaggttaagagatagataccaccctggccaacatggtgaaaccttgtctctactaaaaattcaaaaattagctagatgtgatggcacacacctatagtcccagctactggggaggctgaggcaggagaatctcttgaacctgggaggtggaggttgctgtgagccgagatagcgccactgcactcaagcctggcaacagaacaagactccatttcaaacaaacaaacaaaaaattagggcttggtggcacacacctgtaatcccagctactcgggaggctgaggcatgagaatcgcctgggcgatagagtgagaccctgtctcaaaaaaaaaaaaaagtaattctaatatatcatttctgatatctttgagatatcaaagctatttttgagaatgtatgtgagtctctctgtgtgtgtgtctaaaaacatgaagctaggaagtagagggaaatgtaatatctgttagttaattcagtcactattatataacagaatgtgtttatcaagaccatcttggcatggtagttcagatcagtagcctgtattaatggtaaagggtgttctctggctttaattatacatacattccagagaaaatagtaatttgtattttgttttgtttttgtaacttattgatagtccagtgtcaaattccattggtctgttttgggatacctttatatttgtttgtgaagtgagcatctgggtttcagtgatctccagccagatttgggttctccagatactgaacagagctgtctgtgggtggggtcaaacacgcctgtgacttttgaccattgaaaatgaaggaaaacatttgtggtgagaaacaacagcatatgcttgacctccaaagcatacacatctataaatggataaaagtgactatttaaggttgttttaaaaaagaaccactgtgtctacaaagaaagaaaccctaattcaatgtttgaaaaagcaaactgtgtgggtgaaagaacatgtttttgtcaaaaacatctgtggtgttccctatgatgtatttgatcctggtggtaaatcaacaaagttaagtattagagacaaaaattgactttagacaacttattatgtcataaataatattaattcaacccaaagtatttcaaggctgtctttaactgttgttattttgactaattgccagatatacaaaataaagttctcataccaaaattaaggcattgcttgaatttgttatttagcagttgcagttggttatgtatgtgttctttgtaccttcattttaagttttactttagtacagtgtttcctagaggtggtttcctcactgtcaggagataactgccactgggcctaattttatagaactgaatttttcagcttgccatagtttttaatgtaattttactatagtcatgatttatagaccatattgtttgtgtttttgcagatgtaagagattccatatctgattttatgaggattttttctttcccaaatactgaagcaataaattatggggtgaaactctcccaaacaaaatgtaaaatttacaggaacaaataatttgacatgaaattttctctgtggatgaattgggttgatgaaattaacagcaacagaaaaatggtgtctgcagggattgtgtcaaaagaagctaagttatgtcaaagacagtgaatggtatgaactattaggtgatgaattttaatagtgtccaaatgtaaatagtgaattcaaagtattactcagcagctgcaagagcgatcggaaaagctgacatgacaaattcagtcatttcttaatcactttcgttacgcactattgtcagctctgagaggcaaattttcatcctgatttacacccgtaatgctaatacttgaaacctagaacttctcaaaatcgtttgcttgcaaaacaccttttaaatcatcttagatgtttctgtgacccaatgtcattaaaaaaatgtgaaaaatatattgcatatgtcaaagaaaattttccatttcccatttgtatgttataaaagaggtattatttactgtaaaatccaaaagtattaattggctgcctttggtttaaataaaattgattgttaaagcagaaaatagaggataatatgagtcttattctgctgtagcctcccaataaaagaagcagtgacccaactcattagccctttgatttaatatattgacacttgggtacgaataatttcatttagtggcttttgcttcccagggatcaatttaattagttataaaatgtgacttcttgtcaggagctagaagaaatgctgacgttaaataaagtcatacacaatttaaacaataaagctatcgatgcctggttaaaagttaatgatgcaaaaaaatggcttaatagagacaacctcagcagtgaaagtgatgctaggaaaattaagctaagtgggtgaatgaggaatggtgatgttgttgaattgttaaaacaaatctgtggctggtctgatggctggctatgttgtaagtacatcatctttcagcccgagagacagaactagttctagactccttgctcaatattccttcagtgtgagtttcatttgtttataggttttaggatccaggggagggaagaaatcttgtttaggctgcgtggacaagaaaacttcctgaaatcaactccatgtttgagagaaagatgtagaagtgttattcatgaccgtcccatcccaaagtggcttctgtgaagtagtctcatgtgggctctgctagcttgtccagggccatttctatttgtgctaaaatgtttgaaaagaactctgggtttacattttggcctggaagatttgtctccttctgaatagtggttacttataaaagtagttcttcccaacttagagaaatgtaaccttttttacctatgtaattaatgccacctctaactcacttctgtaatcaatattgttattttatgtctctgacagcatccacacactgattttgacactacttgagttatctttgtctccgtatctctagcctcaatatacttatgttacagaatgaatgaactggcctagaattaagtaactagataatctcaatctctaaaatgcttccaaactccctaatttaatcatagattcaaacccaattgtttaattcagtcaaatcaattgctttgggagtggtgtagtcaaaacaaccagttggttgactaaaagatcctggtttctgctggtatgtgtacatgtacccacaattgcctctttttggcattggctgctactgggtcattaacaccagttagctaaataaaagataaccacattttattgtcagacaaaatttgtatctcacttctccagctgttgcctttctaagtcacttgctcattagctaaagatgaagaacatatttaaacttgatgagttttaaaatccttattctagtcaaaggaattgacataagtattctatagctaatttttcaaaaaacaaccaaagaagtgttttcccttttccagttttgtccctagcaggttctgaagtctgtggttgctggacgggaataaaagtgcaatgaactgagctctggaaaggaagatgaaataggaatttatggtctttaatgacctatcagactcctatttccctactttataatgaagcacatattctccctgtgttttcttcctggaatgtactgraaagggtcaagattaaagatcctgggcaaaagcttactgttttggaaatctgtttattgcatatttttttttctgctggttcagctgccaaggaaattactgtagagcctacagtaggccgtcaaagtgcaatatatctctctaggaaaatcagcaaataacttacctatggtttaacataaaataactgcccttgaaaattgcaataaagcttagaaaccttgaactttcagtgtaatttgtatattaaaaaatgtgtttgggctgaaatgatttggagtttcatttgtcattccatttgtgtagtatacttgcacacattgacaagaaggacacgtggtagttaactttgagaaggggcatttttgagagggagctgacaaactttaaccaacaaaatgactttcagaagtcttgaaggaagaagaaacaacgtggagacaaatgagtatgcttacatagtatttggtaaaactatgtaaaagtacagaagggattattgctgcagttaaaatctgtgccagaaacaagttttccactggagtaaaggttatctttttttttcttcttaatgttgggggaagggcaattaattgaggacaagagggaaattgtgggggactgatgttagataaactattttgtctttgtgttgacattatattggctacagcctacacgagggaatgcctggaaaaaagtaaggagagagaggcattaatattttttagtgtgcgtgggtgcgccagcagtagaggggcccatgttttcttagggctcagatggcaaagctaagcattcagcctacggcaggaaaaaagtgccttttttgttttctgactgcagagtccaggcattcccaggggaacacaatgaatggcccattttgtccaacacggtttcatagacatagatttcttgttttttcataattattcttgcccgtcattgggtgtgcacatgacatttgagcgtgttttaaagtcttaacacactcatgtgcctgcaataaagttactcataacaatcccggctttctccagacaacagagcagggtctgttgttttcacaagtcacagcagctgggaggcaattgtgaagacaacagcttaatctaactggaaaatacaggaagaagagagtatacactaaatttcctcccatattattcaaacaatgaagaataaaaaaaggctatgggtggtctaactcaacaactgattggcagaatatactttaaattgccttagactgttgtctttaaatgttaagaatctacaaagttaaattcactgtatttgttaatcagctaaaaggcaggctcaggcaatggtacacaactacatttcaatggctataaaaattattacagatckcttgttttttatagtttgttaactagcatttggtgtatgtataaaaagatgctttgacaaagtagttatgaagcaatggttaatctcctttgaaaggtgtgtgaaagaccaagaggttcatggtaattcacatcttcatgccaggctgtatttctggtgtacagtcattagtaagttttaaatttcacactgaataacagaatttaggaagaggagagtaactagaagatttaaatctgacctggaacatcagagtagtaaactggctgtgctcttcagggtgctgaagtaaacaaagttatttttattccatgtggatgggaagagataagaaatgtgagaagtacaataaaaaggaaatttcggtgttcatttaagtttgcatttggggagaaaggattaagcaggacatggggaaggaagtgacataaaaagcaaaaatgatagtgctatgcttaactatttcaaactccaccatccttttccctttaaggaaacattttgtgaaagaacttcttatggactcttttatttttttttattattatactttaagttctagggtacatgtgcacaacgtgcaggtttgttacatatgtatacatgtgccatgttggtgtgccgcacccattaactcgtcatttagcattaggtatatctcctaatgctatccttccctcctcccccaccccacaacaggccccagtgtgtgatgttccccttcctgtgtccaagtgttctcattgttcaattcccacctatgagtgagaacatgcagtgtttggtttgttgtccttgcgatagtttgctgagagtgatagtttccagcttcatccatgtccctcaaaggacatgaattcatccttttttatggctgcatagtattccatgctgtatatgtgccacattttcttaatccagtctatgattgttggacatttgggttggttccaagtctttgctattgtgaatagtgccacaatgaacatacgtgtgcatgtgtctttatagcagcatgatttataatcctttgggtatatacccagtaatgggatggctgggtcaaatggtatttctagttctggatccttgaggaatcgccgcactgtcttccacaatggtcgaactagtttacagtcccaccaacagtgtaaaagctttcctatttctccacatcctctctagcacctgttgtttcctgactttttaatgatcaccgttctaactggtgtgagatggtatctcactgtggctttgatttgcatttctctgatggccagtgatgatgagcattttttcatgtgtctgttggctgcataaaagtcttcttttgagaagtgtctgttcatatcctttgcccactttttgatggggttgtttgtttttttcttgtaaatttgtttgagttctttgtagattctggatattagccctttgtcagataagtagattgcaaaaattttctcccattctgtaggttgcctgttcactctgatgatagtttcttttgctgtgcagaagctctttagtttaattagatcccatttgtcaattttgacttctgttgccattgcttttggtgttttagccatgaagtccttgcccatgcctatgtcctgaatggtattgcctaggttttcttctagggtttttatggttttaggtctaacatttaagtctttgatccattttgaattaatttttgtataaggtgtaaggaagggatccagtttcagctttctacatatggctagccagttttcccagcaccatttattaaatagggaatcctttccccatttcttgtttttgtcaggtttgtcaaagatcagatagttgtagatgtgtggtattatttctgagggctctgttctgttccattggtctatatctctgttttggtagtggtaccatgctgttttggttactgtagccttgtagtatagtttgaagtcaggtagcgtgatgcctccagctttgttcttttggcttaggattgacttggcaatgtgggctcttttttggttccatatgaactttaaagtagttttttccaattctgtgaagaaaggcattggtagcttgatgggagtggcattgaatctataaattaccttggacagtatggccattttcacgatattgattcttcctacccatgagcgtggaatgttcttccatttgtttgtgtcctcttttattttgttgagcagtaatttgtagttctccttgaagaggtccttcacatcccttgtaagttggattcctaggtattttattctctttgaagcaattgtgaatgggagttcactcatgatttggttctctgtttgtctgttgttggtgtatgagaatgcttgtgatttttgtacattgattttgtatcctgagactttgctgaagttgcttatcagcttaaggagattttgggctgagacgatggggttttctaaatatacaatcaggtcatctacaaacagacacaatttgacttcctcttttcctaattgaataccctttatttctttctcctgcctgattgccctggccagaacttccaacattgtgttgaataggagtggtgagagagggcatccctgtcttgtgccagttttcaaagggaatgcttccagtttttgcccattcagtattatattggctgtgggtttgtcataaatagctcttattattttgagatatgtcccatcaatacctaatttattgagagtttttagcatgaagggctgttgaattttgtcaaaggccttttctgcatctattgagataatcatgtggtttttgtctttggttctgtttatatgctggattccgtttattgatttgcgcatgttgaaccagcccttgcatcccaggggtgaagcccacttgatcatggtggataaggtttttgatgtgctaatggattcggtttgccagtattttattgaggatttttgcattgatgttcatcagggatattggtcgaaaattctctttttttgttgtgtctctgccaggctttggtatcaggatgatgctggcctcataaaatgagttagggaggatttcctctttttctattgattggaataatttcagaaggaatggtaccagctcctccttgtacctctggtagaattcagctgtgaatccgtctggtcctggactttttttgattggtaggctattaattattgcctcaatttcagagcctgttattggtctattcagggattcaacttcttctgggtttagtcttgggagggtgtatgtgtcgaggaatttatccatttcttctagattttctagtttatttgcatagagttgttgataatattctctgatggtagtttgtatttctgtgggattggtggtgatatcccctttatcattttttattgcgtctatttgattcttctctcttttcttctttattagtcttgctagcgttctatcaattttgttgatcttttcaaaaaaccagctgctggattcattgattttttgaagggtcttttgtgtctctatctctttcagttctgctctgatcttagttatttcttgccttctgctagcttttgaatgtgtttgctcttgcttccaacacatttaattgtgatgttagggtgtccattttagatctttcctgctttctcttgtgggcatttagtgctataaatttccctctacacactgctttaaatgtgtcccagagattctggtatgttgtgtctttgttctcattggtttcaaagaacatctttatttctgccttcatttccttatgtacccagcagtcattcaggagcaggttgttcagtttccatgtagttgagtggttttgagtgagtttcttaatcttgagttctagtttgattgcactgtggtctgagagacagtttattataatttctgttcttttacatttgctgcggagtgctttacttccaactatgtggtcaattgtggaataagtgtggtgtggtgctgagaagaatattattctgttgatttggggtggagagttctgtakatgtctattaggtccgcctggtgcagagctgagttcaattcctggatatccttgttaactttctgtctcattggtctgtctaatgttgacagtggggtgttaaagtttcccattattattgtgtgggagtctaagtctctttgtaggtctctaaggacttgctttatgaatctgggtgctcctgtattgggtgcatatgtatttaggatacttagctcttcgtgttgaattattccctttaccattatgtaatggccttctttgtctcttttgatctttgttggtttaaagtctgttttatcagagactaggattgcaacccctgcctttttttgttttccatttgcttggtagatcttcctccatccctttattttgagcctatgtgtgtctctgcacgtgaaatgggtctcctgaatacagcacrctgatgggtcttgactctwtatccaatttgccaatctgtgtcttttaattggagcttttagcccatttacatttaaggttaatattcttatgtgtgaatttgatcctgtcattatgatgttagctggttattttgctcgttagttgatgcagtttcttcctagccttgatgatctttacaatttggcatgtttttgcagtggctggtaccagttgttcctttccatgtttagtgcttccttcaggagctcttttagggcaggcctggtggtgacaaaatctctcagcatttgcttctctgtaaaggattttatttctccttcacttatgaagcttagtttggctggatatggaattctgggttgaaaattcttttctttaagaatgttgaatattggcccccactctattctggcttgtagagtttctgctgagagatccgctgttagtctgatgggtttccctttgtgggtaacccgacctttctctctggctgcccttaacattttttccttcattttaacttcggtgaatctgacaattatgtgtcttggagttgctcttctcgaggagtatctttgtggtgttctctgtatttcctgaatttgaatgttggcctgccttgctaggttggggatattctcctggatgatatcctgcagagtgttttccaacttggttccattctccccatcactttcaggtataccaatcagacgtagatttgctcttttcacatagtcccatatttcttggtggctttgttcatttctttttattcttttttctctaaacttctcttttcccttcatttcattcatttgatcttccatcactgataccctttattcccgttgatcgaattggctacttaagcttgggcattcgtcacgtagttctcatgccatggtttcagctccctcaggtcatttaaggacttctctacactggttattctagttagccattcgtctaatattttttcaaggtttttagcttctttgtgatgggttcgaatttcctcctttagctcagagaagtttgatcatctgaagcctttttctctgaactcgtcaaagtcattctctgtccagctttgttctgttgctggtgaggagctgtgttcctttggagcaggagaggtgctctgatttttagaattttcagcttttctgctctgtttttcccccatctttgtggttttatctacctttggtctttgatgatggtgaggtacagatggggttttagtgtggatgtcctttctgtttgttagttttccttctaacagtcaggaccctcagctgcagatctgttggagtttgctggaggtccactccagaccctatttgcctgggtatcagcagtggaggctgcagaacaacaaatatagctgaacagcaaatgttgctgcctgatcgttcctctggaagctttgtctcagaggggtgcctggccatgtgaggtgtcaggctgcccctactgggggtgcctcccagttaggctactcgggggtcagggatccacttgaggaggcagtctgtccattgtcagatctcaaactccatgctgggagaaccactactctcttcaaagctgtcggacagggacatttaagtctgcagaggtttctgctgccttttgttcagctctgccctgcctccagaggtggagtctacagaggcaggcaggcctccttgacctgcggtgggctcctcccagttcgagcttcctggccactttgtttaccaactcaaggctcagcaatggcaggcacccctcccccagcctcactgccatcttgcagtttgatctcagactgctgtgctagcaattagtgaggttccgtgggtgtgggaccctctgagccaggcgccgaatataatctcctggtgtgccgtttgctaagaccattggaaaatggtgggagtgacccgattttccaggtgctgtctgtcatagcttcccttggctaggaaagggaattccctgaccccttgcgcttttcgggtgaggtgatgccttgccatgctttggctcacgctcggtgagctgcacccagtgtcctgcacccactgtccgacaagccccagtgagatgaacctggtacctcagttggaaatgcagaaatcacccgtcttctgcgttgctcatgctgggagctgtacactggagctgttcctatttggccatcttggaactgccgttggttctattaatattttattgggaaagatgaagcagtcagggctgggaacttgtctcatcgcctttttaggcactcagatacctgaatacctgtaatctcatttcacttccattcttcgcttggaaatactacatcctcatgatagtgtttttaaatggaaatctaatggagaaatccaaatgctgcttggaaccataggatgacctttactatttcaccactcatatatactgagcatgagcatgaagagatttttttttttttttgaggtgaagtcttgctcttgcctaggctagagtgcagcagtgcaatcttggctcactgcaactcctgcccaccaggttcaagtgattctcctgtctcagcttcccatgtagctgggattacaggcacctgccatgacacccagctgatttgtggtctgcatgccttggcctcccaaagtgtgagccactgtgcccagctaagagatattttttattctggttattatgcacctattctgatcatccttaaattgaaaagaaacccactttttgttatattatttccactttacttacacatttctccactattcatggcagaacataacactgaaggcccaatagctaggttcctgggtgtcaagatctattgcaaatgtgaattattctgttgtctttgctggtattttaccctcatagtcctcaacacttaggtttaattagtcatgtacatgcctttatttttgtgcttacctttaaagtttaacaatttaacaatagttacgatttatggtcttatctgccagacactgaaccacattatgttcattttctttaatattcataaatatgcaatgatatggattttatcaccatttgacaagtgaggaagctaaggttatcatctaattagttggagccaggtatcaaacttaggtctctgtggcttcaaaacttgtgatctttctactatacaatataatgctgcctcccagttaaatgaaagggaggaaacagtagtgtctaattaaaaggaagtaggaacataaaacatattagggcttttcttccacttttcctcctccctttctcattcagttgaaatgccattaagcaggaccaattgtggaaggctcctgagttgggtggcagctcagtggggtttgaagatcctattaggaaagtggcttctcatagtggtggcttaacaagagttgggtcctattggatgaaggttgtcaagtggggaagtggctcaggaggatgaggagattggttggtaatatgtaagagatagagagaaaataaatatacatatgtatgtatgtgtgcatgtatgtgtgtgtgcatatacacatataaatatacacacacacatatacttatttttcctatctcccgtatgtcatattatatgtatatatatatatatatatataatatatgagccaggttttttacttttagaaaagagttacaaatatgaaatgaaggaaaataagaataaactctgtggtattatattggaattagaagtatcaaagtgactttgtggttttatatatatatgtccatatctatatagagagaagtataaatgtgtgtgaatatgtataatacatctaaatatatttcttagctctgtgaggcagcttagaagcaaaatacactccaatagtaatatcaacacatcacaccgagatcttggcttctaaaaactgtgcttctgaatctggtctggggaagggaaaatacaagataagtctggaatattttattattccagaaagtgaggaggtgcttaaagaattttaagagcataacaaaaggataaagcatccagcttgaaggggtaacctgtgtccatatatggtgcaatttaggcatcaaaaatgataataatggatttatcctattgaatagaacatggattcatgaactgacctgatgtatttatgaataaatgaaaaaataaaagagaagagaaagctcttccttaatgtgccaactaataaatatacaagacattacagaaagaaagtcacrtggcaaccatcatagtaataatgaattctgacaagaaacatgaagggatgctaaaactattgggtgagagctggataaagaacgatacattcacatagtctcaaagtatctccccacacagtacttaggaaaatgtagaaaaaaagtgtaacacgatagtggaaaaaacctggtagatactatattactcaggcgacattaacagtgatgggataaattgatgtatattacctgatgggatatattgagaagagcacagcatcgcttctggtgatatgtctgacaaaaatgtattamctgaatctaatcataaggaaacattaggaaaaaagtttaggtacagtctacaaaataactgtcttgaaatctccaaaaccaacccaaatgtccaaaaatgatagactggattaagaaaatgtggcacatatacaccgtgtaatactatgcagccataaaaaatgatgagttcatgtcctttgtagggacaaggatgaaactggaaaccatcattctcagcaaactatcgcaaggacaaaaaaccaaacaccgcatgttctcactcataggtgggaattgaacaatgagaacacatggacacaggaaggggaacatcacactctggggactgttgtggggtgggaggaggggggagggatagcattaggagatatacctaatgctaaatgacgagttaatgggtgcagcacaccaacatggcacatgtatacatatgtaataaacctgcacattgtgcacatgtaccctaaaacttaaagtataataataataaaataaaaaaaataaaaaaataaaaacaacaacaaaaaaatttttaaggttataaagatcagggaagaactgagtatttcagattggaggatactaagaaggcatgatgacacatgattctggattggatcttattgctataaaggatatattgggacagttataacaaaagtgaaggcatcagaatcacttgattttttgaatcctggctctttttagaaactctttagacttaacctttatgaggcactgtttatttagactgtaaaggggcaaaatgatgccccactgaatagtgttgttgtatagattagttaagtatggaactatctagcacttattttttggaatgtagacattaaatatgtaattcattaagcttctttattcctagaagcaattctatatgtagaactatggcaaagccccaaattttaaaaattcctggtttactggtaggtatctatagtaaatgtgaagaaatatgtatatatttgcatagtgtgtaattgtattagtctcttctcatgctgctatgaagacatacctgagactgggtaatttataaagaaaagagttttaattgactcacagttttgcatggctggggaaggccttaggaaacttacaatcatggcagaaggcacatcttcacagggtggcaggagagagaatgagtgcccagcgaagggggaagctccttataaaaccatcagatctcctgagaactaactcactatcaccagaacaggatggggggaactgcccccagcattcaattatctccacctggtccctctcatggcacgtagggattataggaactacaattcaggatgagatttgggtggggacacagccaaaccatatcagacattttgtcagataatttccatatcttttagatagttttcaccttgattccttaaggtaagcagtagaaatattattatctcattgatagatgagaaaattgatacctactggctcaaaagtaagatactagaagaaccattatctcagcctcgtcttttgacatctaaacaatggactttttattatacagtgtgtcttactctcttacaacccacatgctatttatttatttattttattttatttatttattggagagagagtcttactctgttgcccaggctagagtgcagtggtgtgatctcagctcactgcaacctccgcctcctgggctcaagcgattcttgtgcctcagcatccygagtagctgagactacaggcgcatgccaccatgtccagctaattttttgtattttagtagagaccatgttgcccagggtgatttcaaactcctgagctcagccagtctgtccacctcagcctcccaaagtgctaggattacaggcatgagccactgctcccggcccccacatgctctttagataaacacaaacactttgtacaattctttaatgttacagaaagttcagattagattaatgttgcaacacaaaaattatttttatcttccaaggcacatattatttattttaagtatttgtgagtttttcttagacagtgtagaagtcagagcacaaagctcatcacttgtaacatgatactgaatgctctgcttcatttttcttacaacaggcaaagtaaaaccagaatcacaaawacatgttgatgaaaattggtttatggtytggagagactatatacttatgtaggcatacctcagggacatttcaggttctgttccagaccaccacaataaagtggatttcataataaaatgagttgcatgaattttttggtttcccaatgcatataaaagttatgttggctgggtttggtggcttacaccgataattccagcactgtaggaggctgaggcaggaggattgcttgagcctaggagtttgagatcagcctgggcaagatggcaagactatatttctacaataaattttttaaaaaattagttgggtgtgaccatatctctacaaaaaaattttcaaaaattaggcatgtgcttatattcccagctacttgggaggttgagacatgaagataccttgagcctaggagtttgaggtggcagtgagctatgattccaccactgaactccagcctgggtgacgaagtgagaccttgtctcttaaaaaaaagttacactatactgtggtctattaagtgtgcaattgcattatgtcaaaaaaaaaaaaaaaaaaaccacacacacacaatgtacataccttaatccaaaaatactatattgctaaaaaatgctaatgatcttgggaggccgaggcgggtggatgacgaggtcaggagatcgagaccatcctggccaacatggtgaaaccccgtctctactaaaatacaaaaaaattagctgggcgtgttggtgcgcaactgtagtcccagctacttgggaggctgaggcaggggaatttcttgaacctgggaggtgaaggttgcagtgagctgagattgtgccactgcactgcagccttgcgacacagcaagtctctacctcaaaaaaaaatgctaatgatcatttgagccttcagcaagtcataatcttttttactggtggagggtcttggctgctggctggtcagggtggtggttgttaaagattgggtagctgtagcagtttctaaaaataagacaaccatgaaagtgctgcatcaattgactctttcacgaaagatttctctgcagcatgtaatgctatttgataacgttttacccacagtagaacatctttcaatcctctcaaagccttacatgctttatcaactaagtttatgtaatattctaaaccttgtgtggttatttcaacaatgttcataccattttcactcagtagattatctctcaagaaatcagcttctttgctcacctataaggcgcaacttcacatccattaaggttttattataagactgaaataattcagtcacatcttcaggctccacttctaattctagttctcttactgtttccaccatatctgcaactattttctctgctgaagtcttgaacccctcaaaatcatcccatgagggttggaatcaacttccaaattcctgttcatgttgatattttgatctcccaagaatcacagatgtttttaatgtcatctagaatggcaaatccagaaggttttcaatttattttgcctagatttgtctgaggaatcattatgtatgaaagctatagccttatgaaatatatttctgaagtaatgttatgaaagttgaaattattccttgatccatggactgcaaaatgagtgttgggttagcaggcatgaaaacaacattaatctccatgtgtatctccatcagagttcttgggtgatctgcattgttaatgagcagtaatattttgaaaggaatctttttttttctgagcagtaggtctcaacagtaggcttaaatattcagtaaaccatgctgtaaacagatatgttttcatccaggctttgttcttccacttatagagcacaggcaaggtaaatttaagataattcttatggaccctaggattttcagaatggtaaatgagcattggcttcaacttaaagtcactagctgcattagcccctcccaagagagtcagcctgtcctttgaagtgttgaagccaggcattgacttcttctctctagtggtgaaagttctagatgtgtgactcttcctttcacttgaacacttagaggccattgtagagttattaattggcctaatttcaatattgttgtctcagggaatagggaagcctaaggaaagggagagagacaggggaacagctggtcagtggtgcagcctgaacgcatgcaatatttactctcttgcactggtgtggtttatggtgtcccaaaacaactacaatagtaacaacaaagatcactgatcacagatcactacaacagatataataataagaaagaattggaaatattgcgagaattaccaaaaggtaacacaaagaaacaaagtgagcacatactgttggaaaaatgacattggtaggcttgcttgaccagggttgccacaaaccttcaatttgtaaaaacacattacctgtgaagtgcaataaagcaaagaacaataacatgaggtatacctgtacatactaattcaaactatacacaccttcttcaagaagttttcaaggctttccttacttccctctcatttcccctttcctcactactctcactcctacaacgtggcccagggccccagtcttgaaaatctcagcatcattaggcaatatggaacaatggttaaaagtaggattctggaggcagactgcctggattcaaatcctggaccatccccttaatagctgcctgatcttgaggcaagctatyaagcttttctgtgcctcatctgtaaaatggggaaaataacagtatttacctcatgaagatgttttgagaattaaatgtgttaatgcatgtaaagcacttaaaaaagtgcctggcacattgccaatactatatcagtgtagcctttattactataatcattattatcatcaccaatgtaattaccatagtggcttaaaactgtataatagttgggcgtggtggctcacgcctgtaattccagcactttgggagtccaaggcaggcagatcatgaggtcaggagttcgggaccagcctgaccaacatggtgaaaccctgtctctactaaatgcaaaaattagctgggcatggtggagggcgcctgtcatcccagctactcatgaggctgaggcaggagaatcgcttgaacctgggaggcagaggttgcaatgagccaagatcacaccattgcactccagcctgggcaacagagcgagactccgtctcaaaacaaacaaaacaaaacaaaacaaaacaaaacaaaacaaaacctgtataataatatgataatgttgtaatgtcataagtctcaaattagattagtatctgtccttaggtctttggtctctcccttttatttttgtgcctcataagataattcagaacctttcctgttaccctcccttagatattttagtgaaaatattggtatttttgtcttgagagattcttctctaatcagtgctcttatggaaaatctttataggatagcatagacccagctctgttcctcagagttttttctcctacctacactcacaaacatggtttgatgattctcaagtcacatacacctaccaccccaaaatgtattccttgaaaagcaactgtagcagtggggtagggccaccctttccttcarggcataatgaatctctagagaaggagaacatgaagaatacatatccacagacaccatgattctgaaacactctccaaaaaggggtgtgccccatttgtttargagagcactgaactattttgaaataattacatttaaattcactggataatgtccactatgtactaagcactttacatcattttctctttgcaataccctcttttaataagaaaaccaaaattaggccatttttttttatgttactggggtctgagttagatcttttaacatcaattctcttattccagggcctattttaccatatcacaactgtctctgaatgaataatatactttttactgttcaatgaaataaaactataaaagaaggattgaaatctgcctactcttgctttgttcatctgtatgctagtgttatgccattctgagagatcagcttgtgagatgaaggaataggctgctcaggtttgcagtacttggtggattttgtgtgtccttgtggtataaaattgcttttcattcaaagctaaaaacaggtaggacaaggctgtcattgtgacaagttagtgtaaatggaacaaaaaaaaaaaaaaaaggtaacccgatagctcaagagggatatagaatgagcccagacttcccaatggaaccccttttctgtttaacgctaaagtagaatttccctttttctaaagatgatgttaataagtacccacctttacccacaaaagagaaagaaaaacctttatcatgccaatgtcttcctagatacaaagataagcttgcttgctttctttctttctttctttctttctttctttctttctttctttctttctttctttctttctttcttttttctttctttctttctttctttctttctttctttctttcttttttctttctttctttctttctttctttctttctttctttctttctttctttctttctttcttttttctttccttccttccttccttccttccttccttccttccttccttccttccttccttccttccttccttctttctttctttcttccttcctttctttctttctttttttttgagaagcagctgtaaaattttggaaattataggctgtagatataggcttgaattctggctctgccacttgcttggtatagtcttaggtaaattacataattttccttaatcacagtcatctcatatataaaatgggaaagtaatgaagtaatgcctgctttataggacaatttttttcctgctttatggatatataaatgacacacaataattcatccattttaagtgtttgatgaattctggaagttgtatagagccatatgtaacttttagtcccgaagagtttccttgtgtcctctgcagttagcatcccccattgaaaccctgggcctattcattgatatcactatatttttgccttttctaagacttcatataaattgaatcatacaataaatagtcttttctgttagatgtatttcatttattcttatatttcttagatttttcatgttattgggtatgtcaatattttgttactttacattgctaagtagtattccatagaatagacttactgtaatttgtttagccttcctccagttaatggtcattgagttgatttcagctattggcttttaggagtactattgcaagtctatgcagacatatgttttcatttttcttgtgtagctaagagtggattaattgtagggctttatggaaattgtgtttctttaagaaatttctgtaaaagaaagtggctatatcatttttaattccaaccagcaatgtatgaaagttctagttgttctgcatcctcaccaacacttggcattattaatcctttaaatttttaccattctagtggattttaggggtatcttgttgtggttttgattttcatttcttgggtgatgggtgatgttgagcatcctgtcatatacttattggccactcatatattttcttttgtgaattgtctattcaactctttgattccagttttataaatttatttgacttattattgagttgtaccagtttttcttaattattctgaatacaagtcctttatttttttttctttttggcagatattttctcttactttgtggcttagctktttaaccatgtcttctaaagagcaaagtttacgattttaatgacacccattctaccattttttttttctgttctggtttacgcttttgttctgtttttaaatgtttgcctaatacaatgtcacaaagattttctcttatgttttcttctagacgtttttcagttttaggtcttatggttaggttttagtgcattttgagttaaattttgtgtataagataagagtccagacatctttttcctttacagatacctatttatagcaaagcctattttaaagattatcatcttctcactgaattatcttgacatcattatgaaaatcaattgaccaaataggtgtggatctacctctggactctgtattctggtccactgatttatatgtccatccttaaaccaataccatcctaatacctaaatggcattatagtaagttttgacatcttactatacttaactaattttatttgtttaattgttttgactattttttttcatatcaaatttagaatcagcttcatactatattcaaaatgtcctgctggaattttgatttgagttgtgttgaatctataaatcagtttgaggagacttgctgtcttaacactattgagtctttcattccatgaatgttgtatgtctccatttattttagtgtttcaaaattttcctttgtaattttcaaaaaattgtatatatttatggtgtatgatatgctattttgatatgcataaacatagtgaaattactaacacagttaagcaaattaacctacccatcaccttttatagttaccttttttgggtggtaagaacacttacactctactctcttagcaaattttcagtgtacaatacaatattaactatagtcctcatgttgtacattatccttataatgtttcatagcttttagtgtagaggtcttataaactttggttaaaattttctattttatttttatgctaatgtaaatggagttataatttttttctaattgtttattactagtatatagaaagccaatttatttttgttattggccttttatgttgtgactgcttaatttactattagttctggccactttaaaaaaattcttaagattttctatgattatgattatattttttgcagataaaataaatgtcacttctttccacactgtgtgcattttatttatttccctttgcttattggactgatgaggaaatccagtacaatattgattagaagtggtgagagtagacattattgcctattttgtctgatcttaggtagaaagcaaggatcytttcactattattgattatgatattagctgtaggtgtttcaaatatacttttaatcagattgaggaagcttccttctatttaaatttgctgaaagttatttttttaaatcatgaataagtgttaaattttttcaagtgttactctgcacctattgaaatgaccttatgtttttgctcctttattctcttattatgatgaattatattgattgattttcaaagttgaaaccaaccttgcgttcccacaataaacctcacttggtcatgatgtcttatcctttttacatactgttacattctatttagtctgctcacttgtatgctttttaaaactagtacyttaaccyttgggaaaataattcaatttatattttgttaaaagctatctttgtaaagctctgtatattttgaggaatatgagtggagaagttactattttcacattaaaaaagaataatagaagattttaatgtatgtcacagcatataaagttgtgatgggaagtgggaaaaaaaagaggaagagaggcaattwtcagaaaataaaattttgtatcaattttgccagaagtgagatttgctttcatcctctttacatgatgtaggtttatgtttaagaaaacatatttaggctaaagttgaggacagaaagagggtatgtttgtatttaagttttaccttaaaaaagagataaagatggacaggtggggtggctcatgcctgtaatcccagcactttgggaggccaaggtgggcagatcacctgaggtcgggagttcgagaccagcctgaccaacatggagaaaccccatctctactaaaaaaaaaaaaaaaaaaaaaatgccaggcatggcgttgcatgcctataatcccagctactcaggaggctgagacaggagaatcacttgaatctgggaggtggaggttgcggtgagccgagattgcgctattgcactcctgcctgggcaacaagagcgaaactctgtctaaaaataaataaataaataaaaaagataaagaaaactgggaaataaaaatgaaaattcctgaacttggaattcgcatatctagtcaccaggttatgtcaccatcggcaagtcacactatccctatgtgcctcaagtatttcctctgtcaaatgtagtagttaggcctaagctgtattctgggcagggaaggagaaggcatatatatatatttcagaaaaagctcactagagcttctttccaggttagagtcaccagattacatagtctctaaatcatttctgtccctgaaaatctgattttgtgagataagtaaactggatactaaagaccaactttagtttggtcgttcttaagttttgtgaccttggcaagtcacttctcttttggccttacttttattataagccatttatctggcatttatgtttaaaattaaggtattggaaaattggctttctaaaactattgcagttctaaaagtctgtgattctaaagctagctaaatacatgaatattatacatatgtgtatatgtcaaacatggcaaagaacttactgtagtgagacaaataatcattacatttttatgtgaatgtattcagcacccttaagcattatgaaaaatataaaccaaagtccacattgttaaacctagttctaatttttaatgggaaatgtatattttctcttgaacatatgttgaaatgctagatttgtatagtatttgctctcaacttgtaatacaaaaatctaagacttctatatgcttttctaggatgtagttttctttgttatttgcagtctgttgttagaaagcttcaagggatataggacattaaagcaccacatctttaactagctgggacataatacatgatttgagttcccaatattttctaacagtaaggtttgtttattaaagaaaccacatgctgtgactgaatcagtctaatagaagccaagtttgaacttgaacattcaaatgtatgtccatatattttgggcatatatcatacataatgatgtggggtctagacatctttctgggtttgtttatgtctgttatggattcccctcattatccatgctgtttgagggagaccccatggattcagcttgtttattacacactttctatattttaagactaactcagagttccaagtggcatatatgttccaacttggaatattattttctcactttccagttttatgatgatgattaaggaaaaataaaataagattttagggaataatgacatgtttgagagtggctaacaataatcattttgaccatgtttcaaatacagttttataatctttatgtttattataccattcttcctaacatttttgacaagtttgagttatagcatctgttttcttatttttaaatcacattgtgtaccatctgttcttttgttatatttgagcataatttttagaatttaatasatgtaggtaaagactttaaccttcagtattactaattttacagttatgtatacacagtatattcagaatgctagaggtgagtaagtatacatgaagaatagattttgagtgcaaaaacaacaaaaatcaatttctagttaatattattaacttggagcaagtaattcatgatcacttgactagcagccttcgttgttgttgttaaaaatctctcccattaatatttattttataaaattaggtatttctatgtataacttcttaattttaaagaaactactattcatattctttgagttacaaagctattttttcatcaagtgaaataaagaaatcaaataacatgataagaatttgcaataaatattgaaagaggttggattgtcatcagaatttatcattatgggtattttttgagggggtgatatagcacttgctataaatattcatcatgttcttaaatctagagatattccgtgattaggtgattttatgcctgtttatgctggcaggaacaaaagaactttaaaaacagaaaacataaacataattgaaccactcacttaaaagagaaattggaatagatgttttccaggggagaacatgctttctgtataaaaagggctagtgtaacaagaagtcatctattcttgatttctttagacagttagagctttgtgccttgtctagtttctgtgttttaagagcttgttctgtgtagcagaaataatacaataaatgggtttaaccacatttgtctcagctagacagtctgctttgtcagagattgctggtacaacataaacaaattatgtgtttgtagtgcttttcaatgaaagcctatctaacagagctgagattgtgtttcagcagctgtagatttaatctcctacctgtcagttaaaacaggcatttcctgagccagataaggactggttgtagagcagggaagtagtcacagctggacaaagacctattgttattggctgataatttctatgtagattcaactccttattctactgtggaaactacagttgtagtgcagtattaaaggagctagcccagccttttaaaatgttaaatcaaagagaatcaaaactggattttgtgtcattcatttgggggaactgtcatgtggaactaaaaaaaagtctatagatttgatcatcacagttttagatcattgtggatgttatactagggccatggaaaatgcctgttcacagatctgtaactacattcttgggagttcaagttgtaatataagctacccaaagccaaaaatttaaatctgtggattgatgcttggccatgtgactcacatatcatgggtattgtgactacaagtgctgaatattctagaaaggaacagacctaatgttaaatatatgttctgtaataaccatgtgaatgcttctacacttcttctttccttgtatcctaatttccaataggaaaaatacagttattactgtaactattggagaattggagagtagagaataatggcaattagttaaataacttcactcaaataaactttccttccttccttccttccttccttccttccttccttccttccttccttccttccttccttccttccttccttccttccttcctatgatttctttaagaacatgtgaaagtttcaatgtatacatttcccattttgaattctgagtatttctgtctcttgacctgagtgaaccaccatccttccacttctctttgggcttgagtttgtattctttttcagctgtgattgcactgagttattgattgtattgggttgctgcttattagtcctaaacaatgttattggcttgttgttctttgtaacagcaggagtatcatgagaagtgaattactgcagtactggactataccttggaaatccccattttatttcacaaagatgacattagtctcaactccccctaactgaaaaagacaagttttatttaaccagtgtttgagccagtttgtatatatcgatctttgtacttttatgatctttatgaacagtttatttttttccatagaaaatttgttaggtaacttgaattattttaaatattcctatacttcctacacagagactgaactaagaatttacatttttagtttttgtcagtaagctgctctgatgcctaaaatttcattgaaatttcattgaaatgttatttgatataacatttggggaaaagaatcacagtaatgtatcagtatccaaatagattataatatcctagactcttctcccctataggaattaatgagtacaagtatttgaaaatgatgtgcttctatcttatatggaatcactagaaagatcatattttagtcagtcaatcaatgaatgaatcaatcagatactctttgacatatttggaggcaccatcctagtagcatactaagcttctacttgcaagatgttttccttctacttgagcggagaggatatataagatggaaataggccaccattacccccattttgggtctactgaggtgttttctaaactggtcccattatccccattttgggcctactgaggtattttctaaacttgtctctctgcgttcattcttgccctattatagtcagttttcctcatggcaaccagagtgatctttctaaacttaaataggtctcatggtaatactcccttttaaaacccttcagtgactttccatcacactaagaatacaattccgattttcttactgtgctctacaaggccctaaataacctgatctccacctgtctttctagcctttcccctaccactctctatgctcattctgctctgacctttgcactcacatgccctctgcctgagttgcttttctctcttctagctctgtgcaacatttcctcaggtcgtttaaccctgtgtgatgttatctcttcagagacgctttccttggccatccctatccaagatagtcctctgtaccttctacctactacctccaactttctgcctttcattcttcatactctatctagtttcctttaaaactcctattatcaacttacatttattatatctgtatgtatttgttcatgtgtatatgtgtatacacacatgtacatacacacatacaaatgtacatatatatatgtatttttgtatgttgtctgtcttctcttagaaatgatggtagggaatattgtcttctactgtattcccaatgcctacaatagtgtcaggtcttaaaagaaacatttgtttaataaatgaattaatgtatccacatgggaaaaccattaaataattcaacacaatatgtgcagtgcaaatattgacagagggaaatttatgtttggggaattttcatggaagagtttaatttgggctgaaccttgaaagattggtcaggtttgggaaggcaaagaagagaggaaagatcattccatatggtgaaaatgtggtaagaacaaagacttagaaactattgaaagcaaatggagaaacatcatggtacaatgtagtaggcaaagaggagtcaggggtatgttaagagcatcttgtggagaggcagcctaggctagggagtatggaccttaccttctttaacagcgacatctcttttttgtatctaagttatttattatgaaaatggcactaaataaaagtataaaattaaattgctttttaaaaatcagcatgttagcttatccttatagtcatcttcagcgtcaccttgttcattaaagggagatagcaggtgtaggagtatgtgtgtgtgtgtaatgcacatgctgggagtggaggtcaggggttgcaggttatgctccaaaatgacattactgtgcatgtcattagctttgtactctaaaatgacgagactgtgataaagattgaaaacctgaagactacttgacttgggattatagttattgtttatgcctttccttggtatctagtttttataaatattgccttactttatctccctgccccccaatcacatgtacaggtactgtctctcactgatacttccaaggagggacaatttgccatggctgagccccagctgtcaatagcttagacatcttatttacgtcctggttagagttgccacactatgtttctcaggccttcttgcttgtgatgaaactgcttctgctctccatgatagctgatgcttaaatgcttttctgacattcattcattattgcataatgagctcacagtgatataacaatttttaaaaatattattactttggtaaactgtattcttggctctttgggtgagaattatcatttctatcagtaaggattataattgatgatgatgaaatattaaagaagcttagaggcatctctaaatgatactatagaggaatttcaacatgtactaggagtactcagccattaaaaaatcttgaaattaataaagtcaatttttatattttcttaccaactggtgaactttaaagttagaccacagcagggccaaaagaaaagatcactataaggaaatatgtttggactagatttgtactattgcctccattgaagaactgtaaatgatgaatggactttgacttgattcagcagattaaaaaaccatcagaattgttatggcttagtttttaaataacatagaatacaagttcttgaattcatttatatagcaaatatttgttgagcccctactctgtgcaaagtcttttacagagcccttgagagatagaaagtccttgcctttaagttacttgtgcataattttaacaaggcctatagtttaagatgtaaacctgcatttctggatgaggaatttaataatggaactctggtcattgctaacagaataaggttgcataaaatacttcagaggtgaaagccagattgccttcattgtgggtcaaaagtttatgaacggtttatatctgaatttggttgttacaaagaaaggaatgccatattattcacaaatattaccatatttaaatggcatttatacaaaatttgaaaaaaataatttttatcttggcaaaacactttgatcattgtgtatttaatggggtttccatttaggaatgacaatcattagtctctaatatgtttcatacttctctggaaataagacagggtggaataggaaacattcatcttcactagtctttggaaatatctaaagtaattgactagctcagtcttctgtgatggcctggtgaccactaactgtgactatttgcataatagtcaactcttcacttctgtagtgataactgtttgtatcttattaaaattaagactgttttagttctcttgacttttccagaagttgcaaaaattgagatttgctgttctgccttaaccaaacaaatgcacacatggggataacaatatgctgagtttatgcagattttacagcacgaatctgaataaaatacccactaatagatccttaaggagtaataaacacacatgaattttccttagttgcactttaaagtgattttaacatactactagaccttaacaataatatttaattgacaagattatgcatttgtatggattgaaaaggtagtagatatctaattccaaatgaatcatacattttacttttgcatagcatgttttattaatttctttatggccaggatattctatttccctcctggtgagagtttcttaaaacatagtaagataatttaaacacatttaattaacatttatcatccattttataaagaaatctgacttatgttttcaaaaatactctcaatttttttctggggtgtagaccatagatagagtagagaaagatacttaatggaatttttgctatactttagttttctttttaagcaaaactttctctgttgaccttattccaaagtaagctgaaaactggataatttgtactaatatgtaagtgagaacaaacctaataccactacctgaaaaaacaaggctatagatgtctttaaggcacttttatatttctactgcccagcacagaaccaggtatagagtgataggttctcactaaatggctgttgaagagttgaattaagacaagcaacactgccttctcttttggagtagcatgtttctcatgagtctaataggcctaaactaactttttatttgtgtaagtattgagctcttcattttatggaataaggggacaaataagtaagagatactaggaattaagattatgttagtgctaaatccatgttcttttctctgaaaattcaatattaaatagaacatgtacaaatgaataagaaataaagtaattacttttgactacatatgatcctagtagattaatgagatatttgtccattttaaaaaatgcaaataaagtgagtacatacagtatgctgagagtatgctcagtatatagagtatgctgagaatataaaaagagatgttaacacaaaggaaaggattggccctttcagggctattaacatttctctcagaatatatacctgaagaagatttttaaaacatgtaccgttgacctgatagagtcattgtgttcttacttacaaagattatttctttcctctgtaactatggaagagagttggaaagtgctagactgtgaagtagattttaaatagttatcttaaagcaccaacccagcaaatgaaactgctttgtttgcgtgttttactcttggtagttgggcaaggacatagtaaaactagtgacaagataaatctttttcgtttattctgtgaataatttaggcattttgtttagcatgttaaataatcaaaattagaaaagagaactcactttctggagctatttttttcttttgctttaaaccaacttttcattgaagtatatttatgcagaaaagtgtgtgwatatatatatatatatatatgtgaagttagctctttattaatgttttaactaaaacatatgactttgaagtcccaatcctgagtttgtaaagggatgcttttaaactataacatcttgagttcgttctactttttaaggagtttacttggccctttaatgagaattttgaagagtgctaggaatagtgtgccaaatcctgggaagacattacattatattagagatggatattaacaatggtggcaaagtgttttgtatcttatcttgatgggacctgagaaaggaaagaggaagagggaagaggagaagttatgagagacagagagagagagagagaggagtgagtgagagagagagagagaagagagagagcaggagggggagtgagagagagagagagaagagagagagcaggagggggagggaagagagagacagaggggaaggagagagagagaaaggggtggggggagagagaataacctgccaataacaaataacaaacaaacaaacaaacagaagcaagcaaagattgatcctcttctgaatgcagttacattgtttgtacaatgtatatccattggatggtggaatacacctgggaagaatggactctgttctcaaatgctctagaaaatgtgtgtcctaaatttgctcttgctaggattctagtattctcctgttgggctagctagattctctagaagcaggatttgatatattacattagctgtagcagccacagatttgctaaataagacaaatgaagagagaacaagattatatcaagatgtatttaaaagtcagttttaagttctcttctggaatgagaatgattacagctcagtactttttgtagttgcattaacaattctaccctatgaaaattggtggtcagaagaccagatctgaggtcctagttggttggctctcagccattgatcagttaatacaaaatacttactgtgtttttaggcctgtgataagagcaacaggatatatagaaatataaatggcacaggccatttgggacagtcaacttacttgctgagagatgatttatgatttgtgaattagtgaacagcaaagaacacagcatagaatttaaggcttctttgagtacttaaggctgtggccaacaaagagaagttcagtatgttgactactgcattacactttctaaggaagggcgaagcagagtattaaaattttggaaagattttaacaaaaaagtttgagactaaaagggtttctgttaaggcatgaatttatcctgtcaagtgagatatttttcctcctaacctccagaattaactataagtccatgtactgtggatttccatgcactttttggcaataagaagacacatttctgaccttgaaggcttttcctttaagttttctggggacttcatttcttttgctttagatggtgcagcttttacagtggtaatactttatgcaaatgagtcagctattctttgcaaaaatgaatatggtcatttcgaaaactgatccccatcccctgtttctgactgcacttcttgcacctctctctcccaccttctctctctcccaagatcactttttctgaactctctattttctctcttttcctccatctctgtcatggtatacacacattggaaacatttctttcaacagtttaagaagctttcttcaattaaatcacataaggaattattttctagagataaagtatttaaaaaccctcatttttgcactgtctttaactcagtaatagacattaatatgcacatgattttcaatacaaatacttatttcccattactaaaaaaagttaaataatcttcatgaaagagaaaatgagccccctgagtgtcactctgtttgcatattagcacatagccaggtctctgccaagttgctctctgactgattgctgcagatgctctttctcaagtattcagagtcatatctttactgcaagtcttcggggacaaacaatagcacctgttcctcacaagatatcaggccagttagcccattcatgtatctttaatgaagctctggggcagatggcaaaaaatggcatcatcaacaacttagcacagagaaaacaaaggggataagtgttgatgcaacaatgctgttttatgaattggaagagacagaacctaagtgtttcacacacatctgctgctgtcttgattctctgaaagatgtgaggaataccctagcaattaaaatttctgggcatgtagcctatttgatcaagaatatgttccccaccctctccaaaagggaaacactttggttagggattgtataagtttagaattaatggacagttgtgctttggggtagtttattcctttcatgatacactaagcttcacccgtgatggggtttccggttacttggtagtcattcaaattacatacccagccagatagtgcttactttcaaagcaataaaaataacacagttttcatgcccagcgatatattttggccacatctagttttgctctttgtgctagcaaaatcagttttacttcttcatctataggataattaaagaatctctgaatttgtgtttagggaaagttacactttcaagaaaaaaaagatgctatttgaaattttgataacttcttggaaaagacatgtggagactggtcagtctttgatggagtgaggggagttctattattttttattcttagtaaaatatttttgggggttgctgtttccaatgtgactgcctttcctggcatgtcaccaaatgggaaaacgggatgatgggaaggtagggaaaaggcagtattacattcttcatagtgggatggggcttttctgtatcttcagaattcttcatctgccctaagcactggcactcagtgcagtgactttaatacacaacttccataaaaggaaaatatcctggatgtttgtgtgattcttaggtggccaccaagcctctttccttgtcttttccccttaccttgctcttgctttccatttctgttccacattcaaccgacaatcttttagtaagtataatacatggaaagctatgagagggaaaagttgttgctttaatttatactttctgctaatatcacttgmattgggtcatactgatgagcattctgtagaagatggcatttagaaatattgatagaccctcgttgcctttgcttgttttttgtttgtttgtttgtttttgttttgttttgttttttgagatggagtctcgctctgtcgccaggctggagtgcggtggcatgatctcggctcactgcaacctctgcctcctgggttcaagtgattctcctgcctcagcctcccgagcagctgggactacaggcacaccccaccatgcccagctaatttttgtacttctagtagagacagacaggggtctcaccatgttgaccaggatgatctcaatctcttgacctcttgatccacccggcttggcctcccaaagtgctgggattataggcatgagccaccacgcccagctgcctttgcttgttttaaagacacaattcctttaacacactagggcagccatccccaacctttttggcaccaggtaccagttttatggaagacagtttttgcatggactgggtaggggaggggggatggtttcaggatgaaacttttccaccacagatcatcaagcattagattctcataaggagcatggctaggtccctcgcatacacagttcacaatagagttggtgctcctatgagaatctaatgccacagctgatctgacaggaggcagagctcaggcggtaatacttgcttgcccgctgcttacctcctgctatgtggtccagttcctaacaggccacaacctggtactggtccacagcccaggggttggagacccttgcactaggtaactatgaataagattgttggattgtatcaatgtcagtactctggttgtgttgtcatactgtagttttgcaagatgttatcatttggggaaactggattaaggatccatgtgatctctctgtattctttattacaaccacatgcaaacctacaattatattattatcaccaataatcatattccttatcttagatctgtttttcaaaggatgacttcatgcttaatgtaatatgatattaaaagtatgaactttgaccctgacatatctggacttgagtcctgactctataacttttaattggttatgttacttaacctcacatggttttgtttttctcattaaataagtatagtagtagttagtaccttacagggttttgaggattaaatgagatagagtatgtaaatcacttttccagtgtttgacatatagaaaacaagaaaaaatattagctgctgtggtcatcatcatcattatcatcatcattactattattacttatgtaattagacataagaagaacttttaatcaccttttctcaggctagagtctaactagctactggatattctggcttctctttaataaagggcacttggagtttttacatcattttacttaaaataagtttattgttttacttaaaataagtttaagtcaattttaacccttggaacaaaatgatcattgctaatcaatgtattgtaacaaactacacaattaatgatggtagatactgagatcagtgtgttctgtrtaaaataaaataaaaatagaaaggaaggaaggaatttattgaaaattgaacagcattcatagtatccaaactccagcaatatgcttttgaaacacaaaattattttcagctggagacttccaggttttctttgccaaaacagtgcaaccagtgatttctcccttttctatcactgaagtccctctgatgtaatggaaaaagccctggacagggtgattagctgttctggactctggatccagcactgtcatgacactgtaaccttaggctcatatcttttaccttctctagccacctgttttcctatgtgtaaattgtgagctttggattagattagtgattctcaaagaatgacccctggaccagcagccccagcttsacctgggaactttttagaaatgtacactgtcagacccctacctcagatctactgattcaaagactcttgacggggagcagggggagasaaggaagcaatctgtgttttaacaagccctgtgaatgactgtgatccacactaaagtttgagatcactgtcctaaattaaattttagcctaaaatttaattagttggactgaattccagagttttctgattcagtaggtatggggtagagtttaagaatttgcttttttaaaaggttcccagatattgctgatgctgctggtctggtaccacactttgagaactactaggttaggtcatttccaagttctattccaactctatgtttctgtcattactcttgctttcacaatgtcctttgacctcctccttatttactttttctctcaagttattgaatagcctctgggctaatatttagtatttgaagtttctaacatagctttctttgcaragtgtgatgaacagaaatgaatttacctaaattcttacagcttatcttaatatgaaacacctacagctctttggcattaaaaatgaacccgagagtttggttagttatctcatgaagatggaaagttacaaaagaagtaatttaaggcactgagattcaagaattaattctggtttctaattgctattgacctttttctgttgtctcatgctgaagagcttgggcgaccaatataaaaataatgttttcattctaagatgctgctaaataaataacaccaaagagccccaaatacatgttcaaatgagcatgtattcccacctcttctttctcatggttttctagatacttgggatgggataatgctctgtgaggcatgttgtctgctaagcatgacaagcctctgcctgccaaactgaattatttagttggctcatgttttctttcttaaagtagagttatgagtaagatcaactattgcttgttttattgcttgttttatcagtaatttgataatttctagtcctgaatatgcaaaccatataagaaaggaacacggatctaacaaggatttactgtgacattgcattacttttatgtcaggtactgtgccacaagagatacttttattgtctatttggtcctcacaataattgtgtaaggtattataattagcttcagtttttacatgaagaaatagactcagaacaattaagtaactgttcaagattacacagtcaagaaaatagcagcatatagatttgagttcagactttttgccaacaaggcctttagaggcacctagtaaatcctcgataaataaatgcatgataaatgaatgaaggaatggctgtaatcacactatcgtattaatgttgacttttaaacaatcatagaattataaagttggaaaggctctaaaggttattatataatcaggtttttcattacgtatttgctttaaacatctctaacatatggtgttatacagcctttctttactggaccagctctagggaaaggatatataccatctctttactcagagtgactatagaatagtttattactagaaagttcttctttgcatttcatttccatgaaatttcttcttttgagcctagttctgccctctgttaaccattcagtcttaatccaatccttcttccatacattattatttcaaatatttgaagataaccttacctcttttatctctcaagctaaatattcaaacatcttcagctacttctcagtaataacaacataataaatgtttgtgaaatgaaagaaataataaataaatataatatccaaactcctcactttctttttctccctttttagagtataagccatctgtgctatattttaggtacatattagggccatatttctggaggcaaatgaaattatttcctttgatgtactcttgcactgaacaattgtaacccataaaaatattgtgttttattttctggcatagaatagtgccctcgtctctgatgtctcaggtttgcatcagggtacaacaagctagagttcaacagcaaacccggtgcttttcttcagggttaaaggcaagacctgggcactgggggatcagctccaatttaagcaggcttagtttgtactctaatgtacgaaacttgggcttacctcagctaaaatggaagaaatagctgctcaaagctagtttctttcatgccccactggcaaggtagtaattgcacaaagacctttttattataagttgattttcttgagaaatgaattcagaaaaatcctgtaaagtgtttattttttgcttgccctttattaacccacatcttagggctttccctagagaaaaactgttggtaaacgaaacctcttagacctacacagaagcattttttgcactgtgtccctggctatgaagggaacagggacaggacaaggcaagtcagtgctaattaaacagggtcattagccagtgtatggaattttgcctaaagagaagatttaggaatttagacagggaagggtttggggttggaagaattactggtaaaggtttgtatcttaaaaaagatataatatagcccttttataccagtgaaaaggctaaataccctgtttgaacttaaagataatttcttttggtatatcttagttttcatctttaaataagaaaagtcctgtattcaacctataaaactgtgccctgaaagccaggacaaaaccttcctgtcatgctatcctggaatccgggcagcatgcatagagtaaagaaggaagctaggaaattaaaatgtaattttcacaagcatgattctgtcatagctcttattttctttatatggaatacaaatactgatatagagtaaagatttttctattttgcattttttgtgctctttgatacatttattgaggtcaaatgaaatttgatatagtaggatttattatgaaatgttctctgaaaacaactccataattactgagctacatggtagtgcataaagctgtaaaactgcttagccagacaagcaatttatatgttacatcgaggtgtgtatggcaaagagtattactttaattgggagccaagatgtagtagccttaaatctgaagagctatatgtttaacataatgcatgaggctttgaaataagatacctaaactggggagatacagcttttagaatatatattaattagacattattttctgaccatggatactaaatactgtttttgaaagaaagcacagaatgcaaagcaggtgaaagggcaaaacctctcaacattgtacagtgctagaaaggaagcaaacttatttcttctagttctttgtttaaaagaaaaaataaaaggaaaaaagtcaagagaaaagaaaaccattaactacagttcggtggaagcagggacgaggcaaatgcacaatgaagttacgtcttcggtatgctattagcatctcagaaaagggatttggtggattttaactgaattttctcagattgcagatttggaatgaggttagaggtgggtggctgtgtgggtaccagcacaccaccaggagtgaaaaacaaattcttcttggcatacatttgctccctgtctgatcataggctctcttctgtttagcaggttcagggtcacatgcctccgctcatgatcccaatttttccacatgaccagcggacyctggcagcagctgctgctgcccaacagggattcctcttcccccctggaataacatacaaaccaggtaagtagagagggatttaacattcttttccaaatgctcagatctgcatgtttatgcttagtactcacaacaaacacaggagcatgccagggaactatgaataaaaatatcataaaagcttatttyaaagtaaaattagaattgggaagagtgggcattgtaataaactaattggttgctaaaaacttttactttctcttcttccacttgagtttgtcttgaattcacagataagatactactttccctggggactacaatgtttttgtcagctctctctcatacttttactgtgaataattgttttttggttaaagatccttttctcctggtgagagctgttatattctggaaaagtgatcacattcagtataaaatgtcattgtttgttgtcagacttctcttagaaagatagttaaaactagactgatttaattagcttaccactaatggtaaaattgtttttgattttcatctaaaaaaatgaagtattcagtactttttaattcatttttaaacctcaaaaaacaggtcatgtaaccttgcagtgaaatatgttttaagatgatttagcaaatgttgtgatttttcttttttcctcggagtttactggactcctggggaattcaattaggggcataatggtttgaagcttctttcagagcctccttgtaaacagggctttaaatgtttaaagatatgttgccaaaggaatccaatgtaagaagatagtcaagtaaataaaagtcaaccttaatttcatttgtgcattctttgtaagtgacctcagctcagaagtagtgaccttgttctactcattaataatttctgtgtcaagttctttttaacatattaacctgattatatttaccatcaaatctgagtacaacaaatctgcgtgcagcagtttctttgtgtatgtggtttataaagtgaacaaaggcgttttaatatgcttagagcaataataaaatataaatcactttactaaaattctggagaagaaagcttattaaatagcataaaaacaagcctagtgcattttagcatctgttttaattgcttgttgccagtgattactcttttgtatttgatagagaacttccttctttgtaagaaaaggtaggatgtctgtggcaaaacacgaatgattcaaggaattgagatgttatgagattggtgagtttaagggctgtctgaaaattcctcacatataaatgaatcaaactcatattaccaaaaggtttttggatacctgagagaaaattatgtcattcaaattgttaaaaattcatttttctagagcatgatttttagaacaaggtatacttagctactatgacattggcatctatattaaggacaggagtatattttttcagagaatttttttttttttttagtgaagtggttcagtcttcctgtgatctctgtaagtcattctaaactacttcttcattttgactttctttggaacattgaagtaagccaagtttactgttctattctgaatttgagtttgacacccctgtaccagtcccagaaacattttaaatgaactgtatgtggaaattatctatttgacttcagtgtttttaaagttaaatttatccacatttcaaaatcagttatgggtcttattttctgttagacgtagacatcttgcttacctaattttgttgaaacaataccgccacttttcatgggggaagatattgttttattagtgattttagaccatttttcaaatgtcttctctaacagcattaatgagattataatatgtaactgagaaaaacagagaaattgggacaatattgtgcagaaattagttacttctattgaacaaagggcagcttaaagttagtgtcctggggtaacagagctgtatttgattatgttggccaaactgtgttggataaggcaggacaatgggttttgagatgtaggaagagttttaattacaagcaaggttggtaaaaaaaagtgtttactttygtgtgactcctaaattatgtcagacaatttcattaatcagaactctaattctttcaatattttggctaacctaggctttattgtatatgaaaaatgtgtttaaaattcattaaaattatatgttcttacgctattagtagagaaattacatcctcagaagacttaatcaatctatgcagtgtttttatcattcacatgaattaggtgaagagacttctattggactggaaactggacaagtacaatacaacttctttttgccccaaactgagctatggtaacttcacttgaaatgtatgtgagggctgggtgtggtggctcatgcctgtaatcccagcacgttgggaggctgaggggtgggaggatcactcaagcccaggagttcaagaccagcctggacaacatagtgagcccttgtctctaaaaagattaaaaagttagcaaagcatggtggtgttcacctgtagtcctagctacccaggaggctgaggtgggaagattgcttgagcccggtaggttgaggcagcagtgagccrtgattctgccactgcactccagtcttagcagcagagtgagaccctgtctcaaaaacaaaatgaaataaaataaaataaaataaaaaagaaaagaaatgtatgtgagacagcaatgactaaatttttgaaagaaaaccttgaattggtggcataaatttgtattctggttccctaaacaacaagatgaacaagtgctaccttggtctttataaattgaaaaaaataaatttcctttttttttccctttccactttcccgtatctgaaatgatttcatggtatttgtgccttcagctgattgaataattatcttaatttccagagagcaaggactaccttggggtgacattcattgtttgttaaagttgactgtttctgaatccatgttaagacagtgtaagcaaatacatttagggttataggccttcactccccaccctatgatttgacctgtgcctctgggcatttcagagtcccagcgtgtagtaaacactaggcaagctctcccacctcagtgggttgctgagggggcatgctgcccacagggattgttcagctccaggacagcatctttcagattgttctctctagaaatagctttattgagttttaatccctatttttaaaaatgttttacaggttctataattagagacatatttcttgataggaactcatcatcagatcccagaacataaaccacagacttttggttgctttgctctttcacattgtgatacagagaggtgcaccaatcaagagtaagatagatacatttgagcacaaatattggagaaaattaaaagataaagcatctttcacagttgccaatgtgtatatccaatcaagatcagcttgcctgaaaaacagaaacgatgagtagcccccttcatacttcaggcttgatttagctgacccattgctttatgtagttggaattttttacatgattgcggctagaaagcacacttgaagtttcctagaaggtcctaggaacaggatgtctgcctgttcctgggtcttccatttactcactagttatgatatgataatatatgataataataatagctaaagcttactgattgatactgtgccaaatactgtgctacatatttcacatggactattttatttcatccttacttgaacatgtcatttaatcttgctgaacctcactttttgtcatctaagaaatgtgtcacgatttgttcactacccaacgtggacgtgaaaattaaattttgtaaaatatctaaaagttctctgaaaatgataaagcactaagattgggagtaaagtctgacggtgaaactgagtaactttagcctgttaaactacatccttatccattggaaatgcggcccaaaagctgagtgttagactgagtcatagtgtccctctgctcaacgaccaaaaacaattttacaagtatacctaatgtttcttttttattgcagtaaaatatacataatataatagttattgttttagccatttgtaagtatataactcagtggcgttaatatattttcaatattgtataaccaacaccacaatccatacccaaaactttttcatcatacccaacaaaaatgctgtagccattaaataataactctctctatccctctacccttagtctctggtaacctctattctattatttttctctatgcatttgcttattgtaggtacttcatataattggaataatacaatatttatccttctatgtctagcttattttggtaagcataacatttcaaggtccatccatattgtagcatacattaaaatataattttattgctgaataatattcaattgtgtatatatatgtatatatatgtatatatatayayatatatatacatatatatgtatacagatcacattttgtttatctgttcatctgttgataggcacttagtttgtttctaccttttggctattatgaataatacttctgtgaatatggttatagaaatgtttgttagagtccccactttcaatccttttggatatatacctgtgagttgaattaatggattatatgaagttctatgtttaaacttttgagaaaccaccaaactgttttccacagtagccgtgccattttatattcccacgagaaatgtaagagggttccaatttcttcacattgttgctaacacttgttattttcaactaaatttttttattattatcatcccagtaggtgtgaagtggtatctcgctgtgattttgatttacatttccttaatgatttatgatgctgatcatcttttcatgtcctcattggccatttggatatctcctgtggagaactgtctattcaagtagttttcccatttttgagttgggcttttgttgttgttgagtttcagttatttgtgtattgtggatattaataccttatcagatatatcatttacaaatattttctcccattctgtaatttgtcttttagcattcttcatagtatctttttatacactaaagttcttaattttgatggagtccaatttatccattttttcctttggtgcctgtgcttttgatgttatatcaatgaaatcattgccaaatccaatgtcataaagatttaccactatgttttcttctaagggtttagtttttttagcttctaagtttatgtctttgatccatttgagttgatttttgtatactgtgtaaggtaaaacctttttctattgttttacatcttttgcacatggatgtccagttttccccacaacatttgttgataagactatcccttcccccattcaatggtttttgcacctttgtcaaaaatcaatcaactatatatgtaaaggttttaattttgagctttctattatatttaattggtagatatgtatatatatatacacacacacatatgtatatatatatatatgtctccttatgccagtaccatcctgttttaattgctgtagctttgtgttaaaatttgaactatgagctttccaactttattcgtctttttcaagattgttttagttattgggacctcttgtaattccatattaatttgtgaattggcttttccatttctgtgaaataggttgttgtaattttgatagggattgctttgactctgcaggttgctttgggtagtattgccatcttaacagtgttaaatcttcctacccatgagcacagatgcttttccatttatttatgtcatctttaatttctttcaaaaacgttttatagttttcaacatacaagtctttcatctccttggttagatttatccctaagtgtttagttctttttaatactttcgtaaatgaaattgttttcttaattttcttttgggttgttcgttgctgatgtttagaaacacagctgatacttgcgtgttaagcttatactctgcaactttgctgaatttattaattctagtagctttctcagggactctttgggattttctatatataggattatgtcatttgcaaatacaaatagttttacctctcccttaccaatttgatacattttatttctttttcttgtctaatagcagtggctagcacttccactacaagactgaatagcagcagtgaaagtgaacattattgtcttgttctcratcttaaggggaaagctttcagtctttcaccattgaatatgaagttagctgtggatgtttgtttgtttgtttaacaaacagggtctagctctgttgtccaggctagaattaagaggtatgatcatagttcactgtggccttgaactcctggcttcaagcaatctttctacctcagcctcccaagtagctgggactataggcacgtgccaccacacttggccagctgtaggctttttataaataggtttcatcatgccgaggtctttttcctctattactagttttctgagaattttttatgatggaataatattagacttttgtcagatgcctattctgtgtcaattgagatgatcatgttggtttttttttccctttgttctattaatgtaatgcttgacactgatttgatcccttgcattcttgggataaattccactttgccctggtaagtaattcttttaatttgccattggatttgttttgctaatattttgttgaagatttttatatctatatttatatgggatagtggactgtagctttcttttcctgtgatatctttatctggttttggtatcaagataatgttagccttataaaatgaattagaagtactccctccccttcattttttttttgtaagagtttgaaaaggattggtattaattcttctttaaacatttggcagaatccgttggtaaagccatctaggccagagcttttccttactgggaggtctttgatcattgattcattgtctttacttgttatgggtctgttgaggttttctatttcttcttgagttgggtaatwttcatgttttaaggaatttgtccatttctcctaggtgttgaattggttaatgtacaattgttatgactgcataattattcagggcttctttttaatttctttgttttagttagcatttattgagcaccatttgttttccaagataacccccaacctgtgtatgtgtgtgtgtgtgtatgtgtgtaatctcatttaataacccccaacctgtgtatgtgtgtgtgtgtgtatgtgtgtaatctcatttaattttcataataactcttagatataagtggtaataaatggtatcatctctgctttattaaaagaaaataagaaactgatactcaaaaaagttaacttttccaagagttccacatcttgaaatagcggagatagaattcagactgaagttctctgatttgacacttcatactcttggggccttggtctaagtatgtgtgatcttaagaaaatctgaccttttctcagtgaataaaatgtaatttttacatgtggtgttatgcaaatgacatcttgtaaagccactcatttctgtctcttccagagtatttcaaagcagagatatgaactgctattgtaatagttgattatttaaatatatctactcagaatcaaagcatttctgaggttcttcagattagcaccctaatttttaaatcggtgttggggtccaggaagaaaatatgttcagctgtgtaaactaacctagttttttaaaggtctataatcttaactgtgttctcctctgtagatggaggctatatcattgatgagctatcatgaaggcatgaactttgagagtttattttttaatttttaatttttatttgttttattttttgaatgtcaatagtggtgatttctgagattttggtgcacccatcacccaagcagtgtacactgtacccaatatgtagtcttttatacctcgctatcccccaacctttcccccaatccccaaagttcaatgtgtcattcttatgcctttgcattcctcatagctgaactctcacatgtgagtgagaatacgatgcttggttttccatttctgagttacttcacttagaataataatctccaattccaaccaggttgctgtgaatgccattatttcattcccttttatggctgagtagtattccatggtgtayatatatatataccacattttctttatccatgcgtagattgatgagcatttgggctgtttccatatttttgcaactgcaaattgtgctgctgtaaacatgcatgtgcaagtatctttttcatgtagtgacttcttttcctctgggtagatacctagtagtgggattgctggatcaaacagtaggtctacttttagttctttaaggactcttcatactctttttcatagtgtttgtactagtttacattcccaacagtgtaaaagtgttcccttttcaccacatccacgccagtatcattatttattttttttttattatgaccattcttgcaggagtgaggtggtattgccttgtggttttgatttgcacttccctgacaattagtgatgttgagcttttttttatatgatcattggccatttgtgtatcttcctttgaaaattgtctattcatgtcctttgcccactttttaatgggattgtttgttttttttcttgcgatttgagttctttgtagattctggatattagttctttgttggatgtatagattgcgaagattctctcccactctgtgggttgtctgttaactctgctgattatttcttttgttgtgcagaagctttttagtttaattaagtcccatctatttatctttgcttttgttgcatttgcttttgggttcttggtgatgaattctttgcctaagccaatgtctagaagggttttttccaatgttatcttctagaatctttatggtttcaggtcttagatttaagtctttgatccatcttgagctgaagttttttacaaggtgagagatgaggatccagattcattctacgtgtggcttgccaattattccagcatcatttgttgaatagggtgtctttccccattttatgtttttgtctgctttgttgaagatcagttggctggaagtatttggctttatttctgggttctctattctgttctattggtctatgtgcctattttcataccagtaccatgctgttttggtgactatggccttatagtatagtttgcagtcaggtaatgtggtgcctccagatttattctttttgcttagtctgtctttggctatgcaggctcattttggtttcatatatattttaggattctttttactagttccttgaagaattatagtggtatttttatgggaatcacattgaatttgtagattgcttttggcagtatagtcatttttaaaatattgatcctacccaaccatgagcatgggatgtgtttccatttgtttatataatctatgatttctttcagcagtgttttgtagttttcttgtagaggtctttcacatctttagttaggtatattcctaagtattttattttattgcagctattgtgaaaggggttgagttcttgatttgattytcagcttggtcactgttggtgtatagcagagccactamgttgtgtacattaattttgtatcctgaaactttgctgaattcatttaccagttctaggagctttttggattagtctttaggactttctaggtatacaatcatatcatgagcaaacagygacactttgacttcctttttaccgatttggatgcccctattttctgtctgttgtctcattgctcttgctaggacttccagtactatgttgaatagaagtggttaaagtgggtatccttgtcttgttccagcttttagggagaatgctttcaactctttctcattcactataatgttcgctgtgggtttgttgtagatggcttttattgctttaaggtatgtcccttctatgctaattttgctgagggttttaatcacaaagggatgttgggattttgttaaatgctttttctgcatatattgagatgatcatgtgagttttatttttaattctgtttatgtggtgtatcatgtgtattgatttccatatgttaagccatccctgcatccctagtatgaaactgaggattttttaaatcaattttatgtaatggggatgaatttatgtgagttcattcacactcacttatttaattgccattgtgacaaattccacagattttcggatgattggtcaagggtttggatgcagctgtgaaataagtgaagaaagtaaggttgagccttgattcttagctttcttaaaggtagaaaaaacactgcagatgatcttagaagaaattctgaggtcaagactcttttcatcattgatctattctttgacgaatagaaagggagaaatttagcaggagaaataacaacatagtgatctcaacaatatatattataatccttgctaattttatttttcatttgtcctcaggacaaattgaagcttttgtgtcacctattacctgctaacatttactacagtgtggtttcgcataaagacaaattcagacttatggcattccctcagagtgtagaggaattgtaatattttgctgtaccaaatgcgtgcatccaggcaagatccatgctaagtggtatgttcaagtttgcatcagtggttgtgattcaaatatgttcatattgtaacaagaatggctatagctcataaaggtgggctctatagttgtttggcaacttattatcattttatgatgctggcacacaataatttttgagttagttagggatgtgtaacatatttttcttctgttatggaggctgggaaatgaggtatgcgactgaagaatcttttgtcccgtcttctagttctgttttattttttttctctctctactccttccaaactttctaaattatttcttcaatgtgttaacatctgaagttactatctcaggatactgcaactatcccagtcctttgtctttctgaagaatgaaagtaaattgacagacttttacccatgggatttttggctttttttttttttaaaaggtagactttatatctgaattattcaaattaaaagcattattgcaggaggtagcctgaatctaatgggttgtaggttcttagtacaagctccccttctcctgccgttaagttttactaattttctgcttcatgtcagtttctatgaaaatttaagaatttattttctctcatttagggactcttgctgttttgattccaaaggaatgctgcctattctgacaagtgaaactaatgtcaagcaaattttccataagttttaaatcctactttgtctttgttttgtactcttatgataaaaactgtcagttgaaatatgtagaaagctggaaaatggatttacagaatggacattatttctcaaattggtttttgaaagttgtcttcttacactagaggtagcaagggccagattacagtagtgcataaagccaacctgtttcaacaagcttcaccttccatgtacaaattttaaaagaatgggtcctcatgaaagcatttcaaatccagagacaaatttgaaaaaaattgctacaacatgttgactgattccttgccaagtcaggcactgagaactttttcttgattgacttacacagaaaattagagcagcataagggaaacatgcaactttgttattaaaaaactaaacttcacaatacccttaaatccctctccctcttaaatttttcttttctacttgtaatctccctcttcttctccctcatcttctacccctcctgccttgtccttgttctctttcttctaatcattctctgttatatactctgttgctctaatgtattcatttttacttttaatgttgaaacaatgatatgttatggagaaatagctttctaaagattatattcaggtatacagattcaaagaaggataaaagttaaaaatgtttttaaaatatgcctgtcagcagtggaaagaaagctgtttgtagccagcaggtgagctggaaagtactatagggtgtggtagagatagtaataaattaactggcaagccaaaagctgtaaaaaaaaaaaaaaaagctatttcatagcacagaagcatgacagctatgaaaaaaggagtgccccagggaattcttttagagtttgatttttttaaaatatgtttgacatgaaaaatgttttagtacaaataaagcaactggtattaaacttacagggaggggggttgtggtttagagttagtatgaataatgcatgatatttaaagaaagaacagctctaaaatgttccaggaggcagtccatgtcgatggttagaatggtgatttttttcccctatttttgaagcatcattaattcagcatcgttttgtgatttttttaaaacttgatatctaccaaagaaatactatttgacttagattaggatattcttccttcagataatttagtttaaatatcaagaagatcagtagaattgtttaagcataaagtgacagtcatttactataaaaaataatttggcctagttatcttttttaaaaagctcatatagtactgcaaaccaaaatcaacctcatggaaggagaaaaacaagatcagatattttgaacattactccataggagaccagcacaatataatgttagtgaatgcattgtagcagcgctccatatgcaatcagaagccaattgttactggactgtgtacaagcacacactgtgctcaatggtctgatgaggtattatggatatgatgcaaagagactgtgtagattagaagctaacaatttgttaaaagtgaaagcaacttaacatttacattgggccagctgagtagcatttcatatggcaagcaggatgagttcccaggaaccagagtcaccaggaaggctccaggtattcgtgtccataccccaactccaaaaaaagttttcttgctttccagttgactgcctttattactgagattctttctaagctgtctattcattattacattcagctttcagtgtggaaagttcatgcaaaacaacatgattattataaatgtcaaaaatgtgtggaggaacagcctattaaaatatagcctagagatattacataacgctgactttaaataagtagctgaagccaaagtgatactccattaaatcactgatattgtgaaatttatccacacatactaatttttatttcagttacctctgtcatgatatgtttctccttactttgttttggttcttcaggttactgcacacagcctgtgttcttaggtcacagaaggtacttccgtctccctttttaggaatgatctgaagtcagaaacacattaagatatagcattcatctctgctgaaccatactcactctttaccaggtgtttagtacagatattccatgtaaaatgcgcatttatttaatcaaagcatcattaaaatatgtttgataagtgcttagtatgcatgattctgtactaggatccaccagtacagtaccagaggttaatccagacaaacatggtttctacacttatggggataccagacatttcacagaatgctggaagataagattagctgtcctctcagccctatcatattgaagaggttgtattttttaatttttaaacttgtttaataaataaagtttagaattatgagcagtcaatagctcagagccctttttggactctaatactcttctttgcctacaaagccaaaactttttgttgttctaatataaaagccttaatgctttcccagtgtactgagtgtcagcctggcttaaagatatttttttactcttaaaaaatgatgtattacaagattcgcaatggagtgaacatgcttgaattgcacatttaagtttttttaacatcacattcatgttttgccagtttgcctaccagctatctgttaacaaaaagttccaaggcagcactgcaagtctgtgcccaactaagccttttgtttctgcagatgtttgggcttagagcaatgttgtaaagctcaggcaatccaaggaccatgtttgtacttgtctgctgcaattccctgtgcattgtctaaacctgtatgcattgttctttccgacaggtgataactaccccgtacagttcattccatcaacaatggcagctgctgctgcttctggactcagccctttacagctccaggtaagtgccagaagaaaaaaatgtgggatatgagccagtactttagtggaaaactgctaaccagctgtatgctaaataatggcctgaatgttaaataattttttaagcatagcccagaaggattaacaccttatttgcttatcgtaatgcaaatagaagagaaaactgccagtttcaatatttttaaaggaaaagatcacattaggacttaatactatgtattctctatcagatgagtgaatagttttacaatttcaatggctagttgttactgcatacatgttagctttttccttgttagtttttcatctgtgtctccacttatgtccagattagcttttgcatataaaaattgaaacaaaaatgatgttggatattttttccttcttgtagctcatagaataaggggttgttattttcaaattacatgataattattttgtaaattgtaaatgcattgctccttaatatatgtrtcctcaccctttctagggtcaaaagtcagggcatggtgtctgataaattttgcattggtgtttcttatttataaagctaaacttggggggaaagtgttttggaagctgattgaaaaatcatttacaccttatcttcttcacaataaagtgagtttggaataggaatagctgatcattatacccttctactactaccacttgaatgggaggttgactttgaatatgaatgtatatttgtattaataaaaacaaaaagctgagatcattaaaataagtcaaacattcagtatttggatatttagagaatataagataatcaacaacttgacttcaatatagtagaaagttttattaaagatagtttttattcttaaaatatactataattatttttgagttttcttaaattatctacagaatagcatctggtgaagcatttttatttttgtgttgctagtctctatgtgacttgaacataaaaagtatacaactattgtcccatgaaaaaacatcattttgaatgtttccaactggatctgcaaataaagaatttctgcaatactttgagaaattttgtcatgagtcatgatccaggaagttataaagatgtaacccattatgggctgcctagcagagctagaaatttcgcctaagaagagcagcaacctcacctctcttgcaaaccttcacctttcacgctactaacactgaaacctactatagttggtgcaagtctaaaaagaaccctcactattataaacctaatatatttcttctcttcctatagctgtgctattgagtatcttcttgagtcagaggcagaaacaagaaatcagtgccactgtttgatactgtaaccaaatttctgtaaaagaaagaaactgagtcttaaactttctactttctattttttgatgtggtcaataccctggatttagaaatatgtattctgtttcatgagttctgacagtatgttttgtctttttttttttttctgaatatgctactaaacagaagggtcatgtctcccacccacaaattaaccaaaggctaaagggcctaagtgaccgttttggcaggaatttggacacctttgaacatggtggtggccactcttacaaccacaaacagattgaggtatgaatgcttccattgatgcttcattgggttggggactggattgttcagtcatactctaggctttttttttttttttttaaagtggcaaacactcaacctaaacactgaacttaatctttccctttttctcattcctaaggaggctcttcttttgccccttttctttcagagaaaaaagcaaatcccaaagcaatgcccctgaattaaggttgttctttgccatatatattcacacaaaagctttacattataagtgtcttcaaaaccatgtttcttccctcactcttttatattttcttatgcatagtgttgtatagtattttttaaaaaatacttaaacattaaaaaattatttgaccatagaataaccctgtaaatttgatcaaatataattctgcttgtatagataaaacagctgaggtttggagaggttaagttatttaaccaaggctataaaatattcrttgagtcaaggttattgcccaggatttctaattctacgtactcagttttctcagaatgaagtaggggtgggtgcctgggcctggatgattgctttttccaagacaaacttctgtagtattcttttcatatttcaccttccagtagagtcctttgttgttttgttgggatattcttaccactgagagaagatggcttatgaaaaccaagaccttttcttctataagaacccagtccttctctctccaatttcatgcttaattccttttctgcctcaccggggtccctcactgggactctcatattggagaatttccagctatctgttgaattttttaaaaagtggatacagtttacctcaaactgaaacacactttaattctctgggttagatataatagcagattttatagtccaacctaggatgggaaactcaacccaaaaatgaaaataattgcatctagcaagatgtacatttaacttctgatggctctgctggtctgtatagctcaaacactatgtagtcaatgaaaggtccctttgacgttaccttttctgctgcttgtgaatctacctttttggaaaatgatagggaatgatcactcctaagaaaaggaagagacaagaccaaagacccccttggaagtagcctaaggtagaattccagagcttgttaactgcctccctcttttcttttgctttgacataagaggtagagagggggtttccactcagacatgattagacacatactttcagaatatctcctgccttctatacagacagaagaaatttctaaggctttcttttggctgtagagtgagtaccacatttctgggcattctgaaaatctatgcctaggagagctagaaagaaatgactggacattaggaacaagtttatatgtgtgatgacaactagcaagcttatctactcaggacagtcagcttgagagcttttaaatgcctggaagaatgagaaattaggtagccttggctcaaactcaagacttcctctcctgctggacttttctgtttcctctcctggtgggacttttctttctctcctgttggactttcctgttggacttttcttttggattttctgttgaagtgttgtgttctatcccatcaatcttcccttagccaggtttctacccagtctcttcttttgcctaatttttcactcagatcggcttctctcccaccccccactcccaacccccacaccatcactgatccctgatgtgtcaaatctggcttctgttgggtttctggaaaccatgatgtcatgcatatgagtgtcagagctctgtagtgctgtagtgatgctgatctagaagcacagcatatgtcacgtgtctgtcactttaattaggctaaacaggtaaaccattaatgcaagagccttcatagctttgcagtttaaatctggatgctttgatagtttcctcagtttttatttactcttgctctgttctattacctcctatttttgcacctttttcctgcatgtcaggaaacctttgatctgtttgctcatgtggactctggttagaaaagatcgaccttgtttaaaagatgggtttcccaaactttcctagtatgagtatagcatgtttattgggacatctgtgaatagcatagtagacacccatatctaaggtgctagatagtaacgttttaaatcttgagcgagggtagagggatattttaataatatcttggtttattgttatttaaatctgctttcttttctagctagggtcttctcccctcctttgataagctaaaatgtcacagttatgtcaagaaacatgatcatgataaactattgctacttagaaagcattacaatgatattaactggttttatttctaaacagagattcttaggagggaaagcttataacacatatactcccccaccccactgcatgcattactcagaaatggtgttctctacttcatgttacagttaatttgtccttcaaaggttgtcatttctaatattaatgagcctgggtaaatcttaacaacatttggtatatattaagtataccckgaaattttatcaagtagagaaaagttatttaaaattgaaagactctccttatattagcatatgccattactttctttctttaaaataaggaagattccgtaaagaccattttttaaaatactactgtgctgatctaaggcatggttttctctgcctcaggggcacaatattaggagaaagaaggccaaagagtgctatttttagttgaacagttcagcagatgcaggcatgaatactcatatatctgaaggttgaggggtttgaaccattaattttgataatttattaaaccctgggaacaatcagaaactgtaactctaaggttacaatgcttttgacctttagagaacagagagcacttgctacagtaaacaatgtattatactgctgcttattccagttctctcacccgtataaatttcaggaccagttgccatttgctttcttcagctatgttatcattggtccttaagtaagtcaaaaagaatgttaaggaaagggaaccagtataatgaggcagtcatgtaaatttagcctttaaatagtgatgatgttagattgtttctgaagaaatattgtcgtgggaactaagctctggatgactttttttttttaatgaaaaagggacttcagtgtatttattcattttatatggttattttcaatatgatagacccttaattttgttttgttttgttttgtttttaatggggagtagtgttgcctcatagttgtagcttatattaaacaaaatctggtaccatatgcaaagtgatccacctgcctcatgccttcttattaaatgatgcatgcttctctttagcaaatacagcagttagatatcacacagcttaagcatttctaattaaaatatctccatgtgtcagcatattggtaatgtattattttaatccatttattttgtttatgaaacagtgacatatgtttagattgtgaaatatatgagccttaaaaatcactttattgaagaaaattaattcctactatactatctcagtaatgtgttcactcacccagtcagtcactggcggcactgccagtcttaatgttgggtagacattaagacttaccagtcacatccacataacagtcttggaaggaagcgtatcagttctttttcttagcatcaaataatagggttattcttttcttactattttttattacttattaattcaaacctgtcccccccaaaacacttttgttgcctttttaaaaaaatacaatgaaggatggggctcagtatatgtataagagattctgaaagaccaatcaaaattaaagcaagccagttaccttttcaaagttagacatagtaatttgtttgtcagcaggaagatgtttgggtcagccctgagataaagcgactgtcagcagttattcctccaagacaagtaatttcactcaatgtattactgacagattgctcacttctctgaatcaccagaaaaaaacaaacttaatattgttacaggcagagtttctgtcttcattagcttcagagaatgatttttgtctagcatttaaagttcactaagctttagttggaacatattttaacagactatttcttataatgatagtatggatagtagcctaaatgaaagaattgtataagaaaattaaaaatgtcaatataaatgcaattttcactgttatttgatgggtcttatgtgtagtttaggggagatttgaggaaaggaatatagttagagtcttaaagcactaagaaaacctgtcaaccatacgttattcttaaatgaaactactgaagtcttgccaagtttgcaaagatggaggagaacaattgaagtttttgcaaaaatgaatacaagcacatattttatttaaatgatattgtcaatttttgtgctacaaatggaaagtaaagaagtgcccatcagcattgagaatgctgtatttctatttcagttgcagcctgagtctttatgatgttgtatttagaggctctgcactgtctgttgtaccctgtcttcttatttgcaattgtaaagatgcctcagtggtgtgggggaatgggagggtgatggagttagctttgctgggcagtcttggaaagttgtgatttctaatagagaagagggtggaataaatagatgattagggtgacctattactggctacccaatggagaaagaggaatgaactgactcaaagcttgttttgaggatgccagccatggggctctgctttgaagagaatgcatgcttttctcttaatcagccttcactcacccttctgactcttttcttgatttttaagagtgtggtggaatttgggaggaccattacaactaggcttagatgagctgtaggctaatggaattaactccatttatggaattagaactttggattagagtttccactataactttcttgctctgttgtcttgcactgttacaaaatacctccatttgcagtttttttcattgtaaaatgagcataatatacattctcagggttcttataaatgataaatgcaataataaagcatgtattagatttccacaaatgttccctgaaccatcatcagaataggtaaaacttttcagtaacctcagtaagcagtcaattctactctagatttattgtctaaagtacttctgatgggtgggtctaacctactagagtataagttaattaattcagggaattttttgtctcttttgtttactgtggaatccttagcattgcctagcacagtatttggcaaaatggacgaattaatgcatttcatctttggtggacatctgggacccaagctcctttgaaaaccttttttttttccggaaaatatttggttgagtgctctgtctataagagacactcttttatgtcaacaacttttctagataggcttcttaagaaaaagtgcaggtatcaagtgaatcctaatggaggctaaagaaatataggtagattagggaaggatgccaaatataaaggcaattcctaatgcttagaaatctagcttgccattgtagtcwgtgaagcagaagtttatacccaccctcaaactaaaacattggataaactggattttcttttggaactttgctttttatttggttttaaagtaatacctgaaagttcagagagttggctcttctcacataagctctgttaatcactgtgtttgagttatttgattggtgggatagtcagctatactcaaaaccaatgtagtcctctatctctcctgatacaagatttttgtcaacagtcatttagctctagccccactaattaatccactcaataggcagcttccagtgtgtgaacgcatgtaattacatttacatagatttcttgtaagatgtgatgatttctaaaataatgacaggtatttttattcctgttttaccaaactgaagttttaaaatatttttggttgatattatgtatcatatatctgcatgtatgtatatgttgtaatgagctacgttggaattctgagagatgatgtgattaagggtacattagaaagtttgaaagcaaaacattctagcattttagaaaatgcttcacttctgtttccaaccatggaataagtcaggatattcaacatttaggaaatttatattcagaaaaatatatgataaaatatttgaccttccaggtaacagaataggcagaacaggagaaagacattttttacgatattttaattaaaagagattgagaagctacagttggatggtttctcctcacttctgaccactagagctggcacatagctattactgttctgccagttcctcttttctgttttatttgtagaagagttcatatgctacaggtaaactcagggaaaatttatratgatttaaactcaatgtactgatttgaaaacatcttgctttattttagctgttctagattataaagattaggataataactggattctcttctgtatcttcccaagcttaaatggcattaataaaggattcttttctcaattatatgtaaataaacaagcactaaatatgtatcaggtgctatgtgggtagtatgtggattttaaaaaatcattatatatgttcctacctttcattcttctcttataattggtgacagcagtagagtcatcttgagtcaaattgagaggaactaatttaacgctttccccccggttttctaaacatgaattatttgatactgatatccattcaatgcatatttaaccaagtatttgcatttccatttaatggactaagaaatggaaccaagttagagccaaataaatttcctaaggcctctctcttcatattcatttggagaagcaaagatttaaactagaattcttaatttccaataaactgcattgagttcatttctcactgtgtgtttctcttatagcaccagctaccatacctgtaaccaacaggctacaggttgatgttacaatgtctatattaacctagaccataatccttgatgccttgtcagcaattcccctagagctattgaccttgaatggtatgaactaaaacaaaagtaaataagtracagatatgtatgaaaaatttattgcttcaaatatatccgtgtatttgactatctcaaactatacaaagtgcaagcctacagtgctcatttgaagccagtttgaaatagagctgctgtcaccctacaaattccctatcaagttttccctctaatttatctactcatttaaattaaagaaagaatgaagtattacatccttttaaaattcttcttacttgaaatcacatgtggtagctttgaatgtaactgttggaataacttaacacttattgtatcattagagttgtgtcaaaatctacatttaaagagagtttataaatgatcatgctcaggaaatttgaaaaaggcagcatactacatgattccaactatgtgacattctggaaagggcgcaactatggagacagtaaaaatatcagtgggtgccagggatttaggatgaggagaggggtgaaaaggcagagcacagaggatttttagtgaaatattatgtagtgaaaatattctgtatgagagtataatggtagatacatgtcattatatatttgtccaaacacataaaatgtacaacgccaagagtgaaccctaatgtaaactctggactttaggtgattatgatgtgtcaatgtaggctcatcaattgtaacaaatataccactcaggtgggggctgtttataatgggggagactgtacatgtatgggaacagggagtatatgggaaatcgctttactttcctcttaattttgctgcaaacctaaaactaccctaagaaaagtatttaagaaagtttgcaagcaaattaacacaataaatttaattcaattactcagcaaaaaaattttttagcacgtattatatgccaggtcctgtactagacagcagtcttcagctgagggcaactttccccaccccccaccctgtcccacaagggtgtggttgacaatgtctagagggtgaggatgctgctaaacaccctgcaaagcacagaacagccacccacagcaaagaattatacagtctaaaattccaatagtgcgaagattgagaacacctattttacatagtggggacgtatcaatgaataaaacaaagtccctgccctctgagaattttaccttctagtgggagaagagaaaataaggaaaggaatatataataaagaaatgagactgcaaatcttactcatcttagcagaaatatcctcacctatcccatctgcctcaatctgggtgggaaaattttttaaaattaagacctattagactgtttatcctcagtttttttttccttcactttgatatttaagactaaaacttttattctagccagtcacttctggctagaacagtcacaactctcttcagtagtattaagcatatcatgtactcaggctgtcaataagggaatattattttttagtttaatagtatataagtctgcctttcacagtgaagtaaatatgaaatttggtgagaacctgggaactgttcattaggttttataggatgctagttaccgaaatctcataggatgaatgaaatcattcttagctataattgatgtgtaaattggatattacaaaggagactaaatttctttctaaaacaaaatttttaaaagaaacatgagtagtattaatattatatgtgtacacatatatacatacatatatgtatacatgtataaacacatacctattttatagccttttacagttaaaaaacaatttatatttagcctttgtgtaaatgttttaatattattcccatattttggaagaagaaagtgaagctcagaagagttaagtgacttagacaagattactattctagtaaacaaaataggactgtaatagatggtttaagtgtattttaaattttacctcttggtcaggattcttggcattaagctctgttgactggtatataggaatagaagctttcttgtataatttattcttctcttgttataatattcaagtgaattaaaggcaacttaattaaattataaaagagaaaaatttcaaagtcagtatgacattctcagaatcccaaagagttcacgtatttttcaaatttccagttaacatccagaataaacgtcaaacctaagagaatttaatgagcagtagaactactgtgataaaaactgtcttatcttattccgtggctttcctttaggaaaatgtttagtatgtttttgctgaatgccagaaccctgtttttttgagagtttctgggcctgtcttatagtttcaaagttttgatgagtctcctggagtagctggggagctctatccttgcccatccctagtctgggatgcactctgagcatgttcagcaggttgcatgccagcagatgaagcagatgtttgaccatactgggatggagcgcctgctgcattaggagctgggtattcctcttgacatctggatgttgctgggtcacgatgcctgcctcaggccaggagtctgcgggaactgtggggcagagagcacagagtctttgctgctctttaagcgattagtgcactgaagcagcaataatgttgaattatcgcctggctgctttcttctcaggaatcttgggacaataggagagtcaagaaggagcatttacagtaaagtcatgttcagagagacaagactaattatagagtattaaagagctttattttaaacgatttaatttacaaatagctctgggcagtgcatggaactttttagaaccataaacctgtagcttaaagagacttttctaatttaaagtggctagtatagaaacatattgtttcagcaattattcagttttagagtttgttcaagttgtgccatagaagattcagcatctagttaaaaaagaaaamatactaaaacttgaagcttgtggggaaagtgtctctaacttgaggagaaggaagacctttaggtaagagactgcctgaattatgtactggcttttactgtttccctttatcacactgaaaactggtagcatttgctacccagaactgaaaccatctgttacaccaattttctttatgatatgtgttatttaagcacaatggatgtggaaatgggtagtttaaaatgtgttttgtgatgaacagttgtcacattatgttgctttgcctcttataatttttcattagtgagacctctgtgctaaaagaagtcttcttataaacagattatggtcatttatgttcacagtaatgtattggataagaatgctatgttgctctcacttaacctctcgtattctaagggggttatatttaattaacgctggtgagaggctgacctgagagactgtggaaagtgattgagctgcattttgtaagctctgctctagtcagctgggagagaaattttctaaaaaaattggaaagtactgtcttttgaaattccctccatctaagctgtatttcaatgggccatttaatgctcaaatggacaaaggtattacttcattgaattttatcaaactccttctcagaggctcagtttaaaaactctataagaaaggtagtttagcttcttaatagtttatcacttggtctgctttaaaaaaagcaatttttttttttaagaaaaggagaaacacttactgtcactggaatggagcatgtgccccaaccagtcctcaccatactgggattgccctccagagttgaggagctccttagctcacaaagaaaaagatatcctctctcagtgttgctgttcacctgctcagaacatcctcttcatggccaaataggggtttgttccagggcccaagaggcagtacattcataatgtgtagttatgtcattggctcagacataacacaatagagaaggcaagagagtgagatcctgagaccaagagacagaagctttgttgaaatagtagaagactaaatgtgactaatttgggtggaaattcttcacttctccrttcatttatcaatggtgttgataaagaggcatttcttaaatgcagaacaaaatagtcatctatcattcacctatatccaaccaaaccctcctgattttagatctacctctgcctccatttcctgattaatgaaactctattgccaaatacagacataccccactgtgaaacagaaagatgactatatatcatcagatgatgatttgtagccatttattgaaacaacatgctacccttggtttaccagctggcttgctgtcttacatgttctctgtctatacaatggtgaatggattagaggttccaggaaagtggtgcttcttggttccataagaattctgcagttaaaaaagctaagtgatcatgagctaatttcctgtgaacctcagtctcttcgtctgtgaactggggataatgacaccccctcagtagggttggggttaggattaaatgagataatataagcaaattgcttagtacagtgtctgctgcatggtagatgctcaataaatatgtttgtccatactcttctgcttgtatctctcttattcattcattaatttgaaaaatatttattgaacatgtactatgtaccttaggtactcttttaagcaatgaagctaagaaattactgccctcttatagtaatagtctgaggaagaaataaattaaatgagtaatactttaaggtgataggaacagatagtatagggctaatcatttgagatgtgtgtgtatgtatagcatgtgtgtatgtacatatatatactgatttattgattgcccaaggtgattgtgtataggcagtttgaaacccttttgtcctaatttctatgcctgatgactgttcctggtttcaaaaagcatgaggcccagtacagtgctctttagcaagaagtgacagccactccacaattagggtactttaacatagatttcccactaatcatgaaacaaatgtcatgttattgaaaataaagmcttcacaaataggcaatgagattgtacaattccatagactttcagagctagaaaggtcttcagaggctttgagggtcaagtcccaactctaccactggttccatgtgcttggacaaattaatcttcctggtacctagcttttrtcaaatgggattaggaaaaatacccccatagggaagttgtgaggaatacataagaaaatgtttgtgaaaagtgctttatacactgtcaagtgctatataaatcttataattttatagttgaagaaactgaggtctagagagatagattaacttgaccaaagccacacagctagtctgtggcctggtttagatgtatagaattgttagccaacagtgtaaataactaaatttgattgcttcttgtacatagatttaactaaattcaactgaattggccaagaggacagtatatctcatgctcctacctattctaagtgggagtcaatgagcgatcagtattagtagagatatatttttttcacaagcgaatataccaatctaatgaaaattattcattaacaaaacaaagtaaggcattaaaagtgtaagaccctgttacagtgctggtagcagtgacaaagctagaatataagcttatgctaacacgatgaaaagagtaattatttaattagttcattcatagattgattcctcaaatgtttattaagtgcctactctgtagtatgcactcttttctattttgggcacactaagatcaagagaatttgactcttgcccctgaagggcccacaatctagtaagcaatgtgataattgttaaaatagatgtgttccccgagtgaaatgctatgaaaggaggaagtgcttagctccccctggggaagtactggcaatcttcatggataaggtgatgttaaaattgaatcttaaaaggaggtataagttccccaggtttatggggaaggatgcagaatggcaaagatgcagagaagagaaaaagcactccagacaaagagaatagctacccataggtgtagaagcaatagacagcacggcacattcagaaacgacaaacagttggcacagcctgagtgtacaggagcaatcataggtgaaattggaaaggtatgcaaggggtcagatcacagagtgccttttacactgcacaagggaatttggaatgcatgtggtagacatgattttattcacaccataaatggtaaagtagtataaggtatagtgaacaactttatggtgtgatattcctcttaatttgatctctagtttacatttcccattacactagatttaatagttaaggcactgtgtttggtaagattgatagtccctttagtacaatggtaccctgtggcaaatgagactgtacaaatagtgtaatgatacatgctgaataaacaaaactgtttaagactgaagcaaagccaaggtccaaccatttcctggggatttggggaaatcctgtaatctgcagtttatactaagcccaatcatatttagcacattgcttctcagtgaatgggccttgatactgtatttcaaccaaataatgaagcaagaagtaagaaatctataaagaaaagctatggttcttctaattgttaatgccttgcaattatgcccctttctggaataataaaatgttccttggcagaggtcaggatctctgccactgacttatttaacagatcctcttaacatctgtcctgcagactgttcactttattagcagacaagagacccaacagacttagcctgctgtgtccctttttcacattcacacagctgtggattaactcagactttccagaagaggaccaaccagaagggatagtaatgttattggctgattctaaaaagatgggaaaaaagagcagaaacaaatgttgccctagtacaattcagtgtttttagggtgacaattaccagtctgttttaaaaaggaataaaagcagctattcctctaaaaaaggaaagtctattcatatctgtgtgggaacctaatcaggctcttgtttccagtgacgatgactccacagtcgcaccaggtctgtgacaagaatgctccttttgtmtgccgataatgtggaaacgataaaatttcctttaagagacatatgtgtttacatcatgagatatgttatttgacaaaatgctttgttctcctcatattttccatgcagagtttcatgctgggttgctgggctggaaatctttgattaactagaattagttgctgaaataaaatagacacttttgtcttatgattcatcttgctgagctgtaaattatagtaaaacacataagaagtgacagaaagaagtgctgatttgaacctctgacccacaacaggcataaaaacataagattattccttcaaagagctgcatagcgacataaatattccatggtccacttggaattatgccctcttaaccaactaaagctgtgattttacatcatgtaatgagagttttctaggggtgttatggcaggcacagaggagatattaagatttagaaaaatctcccctaaattagtactgtgaatgcttaaagattttttccttcattttttttgtgtcatctttaaattgacaataaaaaggataaaagaaagttcttgttccctacatgaagagccaagggtgatttctccttttccagagaagtggtgcattttataaatcttaagactctcaacaccacactggcccttagtgtgaacatcttagctctgtgaaatacagtctaggggtacgagtccaaaagaatgggctgaaaggagagatattactaaatacagaacagaaactccattagcccaaacgcttcctcattgcagggactggtgtgaattctgctagatttttaaaaaattattattatttttttttagagatgggatcttgctttcttgcccaggctggagtgccgtggtacaatcatagctcacttcagccttgaactcctgagcacaagtgatcctcccaccttagcctctggaatagctgaaattacaggcttgagtcaccatgcctgactaatttttttaaaaaagtcttagagacagggtctccctatgttgcactgtgcctggctatttttaaacttttagttaacaaagggcctctttctggggcttcactgtgagtaaagcctacctaactgttcctctgtccaaattaattgttcccagtgatggtgtttcagtagtaagttgtaaatgcttccattataccatttattatattatgtttttctccctgtcttcttcccatccgtgctgtgagacagcatatctttgatgtcctgaaagacagcatatcttcttcatctttgcatcagtaatatatttttgctaaattaaataaaaatgccaataagtatttttctgaataagatctttagagtgatttctgttaaagaagaatgtacctttaagaataacaagagcctatgagtattaagtcttcataatgtgcctatgttttaagcacattctgcatgttaattcatttactccatacaaaaatctttcagagtaggttctattgttatccccattttcacagatgtggaaatgtaaggcccagagagattaaataactgcccaagatcacacagctagttaacagtggtttactatactattctttctctcatagaaacttgtaagacctcattttttctaaatttctttttcagtcttttttttttttttttttagttttcttaaatatttatttataattgacaaataataatagtccacatttatggggtacagtgtgatgttttgatctatgtatacattgtagaaagagtcaatcaaggtaattaacatatctatcgccttattttttttttggtgtgatgagaatgtttttttttttaattatactttaagttttagggtacatgtgcaattttcagtcttttatattaactgttacctgctttacctgctataggaatttttcaaggtggattattgtgctgtatatcagtatcatatctaatgacaataaagcacattgtatgcttattatatactatttgaatgatttttactatggttgatatatataaggtatcatttctttagctaattagagagttaagccacaggtattactgtaggatacagatggcatatttacgtgctgcaaaatgtgctgaagttctccagttggcagtactaataatttgcagtttaaaaagtgatggttagtaaagttgccttgaaatggggtaaaacatttttttwaatttaaaaaatacagaagaaaatgtaagaagaaagtaagaagacgatattttatatttcttgtctagtctacctgatcacttataagtaaattcaaaatacttccttatgtctcgatatttataacaaacacatattttactttagtattaacatgaaatttatatttaataaatctatgtattattatttttgttcattagcatgatttttgtttgcaatctttcaaagtctgctgagaaattaaatacctagtttagcttaaaaacagtaaaaacattttgatataataagcatgttcatttccaactagtaatatttgttctgtccaataattaagtgaaaaaatagcattcgaataatcttatactttccttttgtgcaattttattttatcaagtatatatatttcacaatttaagtaaagacctttttcttgtcattacacagttacccatgcttgcctttattctgtgttcttttggaagcttcattatggatggaaatcgaagggcatagaagctgggcagtgtacattatttttcaagcaacagcatctggttccttggcagtcattgtgggccaaggcaaggcagccctggcatatctccagattcttatgtgggtattgctgagggatttccaggtctgccatgttgttttaatggtgtttcgtagaaactcagaaactcagaatggaacacaaagtcggtttcatggtatataagacctacatgatctggccccattgctatctttctgacacctgacatattacctcttgcccagctcagctacactggtctcttcattattcctcaaacattccaagcacaagtacacccttgccataggactttcaattatactttgcctctgcttggatgctgtcctcatataatgacatggcttactctctcacttagctcaggtctttattcaaatgtccccttctctgagttttcttgacctctctgaaagcctcccagcctaccccatactcatatacctgatcactttatatttcatagcacatatcaccaccagatttacatatctatatgcttatctgtcttgttctcccttcctcctcccacaaagtcactgcccacgtctgcttttccaaaaccaaaatgatacctggcccatagtagcaactcaataaataatatttgattgaatgactgaattaaccttttgtttactaagaaattacacattcaaatattggtaaattgacatatattcatttactaaaaatacatgattggactcagcacatgtactaaaatatatgtacacattgagaacttccttatgactcttagtttgtgggaaataatacttagatttcaaatctaatttctggactcattgatgagtttttatatcttattagaagagtcaagatgtacgtatttaaagtttacctgatgagctgaagctttgtgacaagagataaaggaacattacaaatataagccgtaccacttggagcaaattcagagaactgaatctcttcagcatggtctgcccagctcttggaaacaaaaggaaaacacatctatccccataatgctgattttcaactgccctaattatcacctttttgtatttcttacttcaagaactaaattacaaattgtttcaataactaacttttatttctgtaaataaggcattatatgttaacatattttatttagcaccctgaaagaaaaaatacttggaaaaagcagagagagagagattgagtatttcatctccacctttttttttggcaagtttgttatttagatagattgcatgtcacaagggtttgttgtacaaattatttcatcgcccaggtaataagtgtagtacctgatagatattttttttatcttcttcctcctcttactctctgccttcaagtaggccccagtgtctgttgttcccttctttatggccatgtgttctcaaagtttagctcctacttgtaagtgagaatatgtggtatttgattttctgttcctgcattagtttgcttaggataatgactgccagctccatccatgttgctgcagagaacatgatctggttctttttcatggctgcatagtgtttcatggtgtctatgtaccacattttctttatcaagtctactatgacgggcatttaggttgattccatgactttgctattgtgagtagtgctgcaatgaacatacacgtgtgtgtcttggaggtggaatgatttatattcatttgggtttatgccccataatgagattgctgggtcaaatggtacttttgttttaagttctttgagaaatcaccacactgctttccacaatggctgaactaacttgcattcctacaagcagtatataaccacaccagtatctgttattttttggctttttaataatagtcattctgactggtgggagatggcatcttattgtggttttgatttgcatttttctaatgcatttctctagtgatattgatatggtttggatttgtttccccacccaaatctcatgttgaattgtaatccccagtgttggaagaaggacctggtcagaggtgatttgatcatagtggtggatttccctcttgctgttctcataatagtgagtgagttctcatgagatctggttgtttaaaaatgtgtagtaccggccgggcgcggtggctcacgcctgtaatcccagcactttgggaggccgaggcgggtggatcatgaggtcaggagatcgagaccatcctggctaacaaggtgaaaccccgtctctactaaaaatacaaaaaattagccgggcgcggtggcgggcgcctgtagtcccagctactcaggaggctgaggcaggagaatggcgtgaacccgggaagcggagcttgcagtgagccgagattgcgccactgcagtccgcagtccggcctgggcgacagagagagactccgtctcamaaaaaaaaaaaaaaaaaaaaaaaaaaatgtgtagtacctcccccttctctctcttcctcttgttccagacatgtaagatgtgcctgcttccctttcgccttccatcatgattataagtttcctagggcctcccagccatgcttcctgtacagcctgcagaaccatgagccaattaaaacttttttcttcatagattactcagtctcaggtatttctttatagcagtgggagaacggactaatacagatgttaagcacttttgttacatgcttattggctgtgagtctgtcttcttttgaaaagtgtctattaatgtaatttgcccactctttactggggttcttttttttttttttgcttattgatttaagttccttatagattctgcatattagacctttttcagatgtatagtatgcaaatatttcccccattctataggttgtctatttattctgttgataatttctttagctttgcagaaggtctttaattagatctcatttgtcattttttgtttttgttgcaattgctttggtatcttcgtcattaaatctttgccaggaactatgtccagaatggtatttcctaggttatcttccaggatttttatagttttaggttttaaacttaagtctttaatccatcttgaattgattttagtatatggtgtaaggaaggggtccagcttcagtattctgcatatggatagtgatatggtttggctgtgtccccacctaaatctcatcttgaattgtagcccccataatccccacatgtcatgggagggacccagtgagaggtaattgaatcatgcggaaaggttcttcctgtgctgttctcacaggaagtgaataagtctcatgagatctgatggttttataaagggcagttcccctccacacacacttttgtttttgttttgttcctttttttgaatttctttattattattattatatactttaagttctagggcacatgtgtacaacatgcaggtttgttacataggttaacatgtgccatgatggttagctgcatgtatcaactcatcatttacattaggtatttctcctaacgctatccctcccccagcccccactccccaacaggacttggtgtgtgatattcccctcactgtgtccatgtgttctcattgttcagctcccacttatgagtgagaacgtgtggtgtttggttttctgtccttgtgatattttgctgagaatgatggtttccagcttcatccatgtccctgcaaagaatgtgaactcatccttttttatggctacatagtattccatggtgtatatgtgtcacattttctttatccagtttattattgatggacattgggttggttccaagtctttgctattgtgaacagtgccacaataaacattcatgcgcacactcttttgcctgccactatgtaagatgtgcctttgctcctcctttgctgtccaccatgattgtgaggtctcccaagccatgtggaactgtgagtcttattaaacctctttttctttataaattacccagtcttgggtatttcttcttagcagtatgaaaatagactaatacagatagccagttattctagcaccattcattgaatagggaatcctttcctcattgcttgtttttgtccactttttcaaagctcagatgatagtaggtgtgtgactttttttctgggctctatattctgttccattggtctatgtgtctgtttttgtttgtttgttttgtttactagcaccatgctgttttggttactgtagccttgtagtatagtttgtagtcgggtaatgtgatgcctccacctttatattttgcttaggattgccttggctattcaagctcttttttggttctatatgaattttaaaatagatgtttctatatctatgaagaatgtcattgatagtttgataggaattgcattgaatctatttaattgcttttggcagtatggccattttaacaatattgagtcatcctatccatgagcaaggaatgtttttccattcattttccattagtatcatctgtaatttctttgggcagtgtttcataattctcattatagagatcttccccctccctggttagttgtattcctaggtatttaattcattttgtggctattgtgcatgtgattaagtttttgatttggctctcagttgggacattgttggtatatagaaatagtttcagtagaaatggcgccacctcttctttatacatctggtagaattcagctgtgaatccatctgtaaatcctgggatttttcttgtcggtaggctttttattactgattcaattttggaatttgttattggtgtattcagggatttgatttcttcctggttcaatttttggcagttgtatgtttttaggaatttatccgtttttttctaagttttctagtttgtttgcatagagatgttcatagtagtcactgagagttttctctattttgtatcatcagtggtagtgtcccctttgtaatttctaattgtgtttatttgttctgttttctttattaatctagctagtggtctattaatcttatttattctttcaaataacaaactaccaggtttgttgatttttygtatggttttttgcatctcagtttccttcagttcagctctgattgtggttatttcttgtcttctggtagttttggggttgatttgctttggtttctctagttcctctaggatattgagttgtgatattgggttgttaatttgagatctgtctaactttttgatgtgggcatttagcactataaactctgcttttaacactgctttagttgtatcccagaaattctggtatattgtatctttggtctcattaatttcaaggaatttcttgatttctgccttaatttcattgtttactcaaaagtcatccaggagcatgttgtttaatttccatgtaattgtacaattttgagtgattttcctagtaatgatttctatttttatcatgctgtggtctgagagtatgtttggtatgattttgttatttttttaacttgttgaggattatttatggctgattgtgtggtcaattttagcatatctgccatgtacagatgagaagaatgtatattctgtttttttgtggggtggagggttctgtagctgttaggcccatttggtcaaatgttgagtttagggcccaaatacatttgttagatttctggctcgatgagctgtctaatactgtcagtggggtgttgaaatctatgtttgtatgattctctaactctcttcataggtctctaataacttgctttatgaatctgagttttcctgtgttgggtgcatacatatttaggatagttaggtcttcttattgaatagaaccctttaccattatgtaatgccttcctttgtctttttaaattgttgtttatttaaagtatgtttttttttctgaaattagcatagcaatccctgcttttttctgttttctgtttgccttgtagatttttctccatctctttacctttagcctatgggtgtcactgaatgtgagatgagtctctgtagacagctcatagttaggtcttgctttctttatccaatgtgccacttcatgccttttaattgggcatttagcccatttacattcaaagttaatattgatatgtgcaggtttgatcccatcatcatattgttagctggttataattcagacttgattgtgtggttgctttatactgtcactagtctgcgtacttaagtgtgtttttgtggtgggtggtaatggtctttcctttccacatttagcactcccttaagggcctcttgtaaggcaggtctgctggtaataaattcccttagtacttgcttgtctggaaagggtctgatttctcctttacttaaaataaagcttagtttgtctgaatatgaaattcatggtgaggatttcttttaagaatgctgaatataggcccccaatctcttatggcttgtagggtttctgctgaaaagtttgctattagcttaatggggttccctttgaggttacctgctccttctttctagctgcctttaacattttttctttcattttgcccttggagaatctgatgactgtatgtcttagggacagtcatcttgtatagtatctcacagaggttctttgcatttcctggattcgaattttggccaagctagtgaggttgggaaaattttcatggatgatatcttcaaacatgttttccaagttgcttgccttctattcctctctttcaagggcatcaaagagtcatagatttggtctctttacataatcccatatttcttggaggtttcattcattcttctttattatttatttttttgtttttgtctgactgagttattttagagaagcagtcctgaagctctgagtttctttcctcaacttggtagattctggttgatacttgcaattgtattatgaaattcttgaagtgagttttttagctctctcagttcagtttggttctttttaaaatggctatttgtcttttatctcttgtatcattttattatattccttagattccttggattgggttttgactttctcctgaatgttgatgatcttcattcctatccatatagaagtcagaaatgaattctgtttttgacatttcagccatttcagcctggttaagaaccattgctggggtactagtgtggtcatttgaaggtaaaaatgcactctggctttttgagttgccagagttcttgcgctggttctttctcatctgtgtgggctgatgttccttcagtctttgaagctgctatcctttgaatgtttttcttttttttttttttaatcttcttaratgcccttgggggttggattatggtaaaaggkgggttcagttgactggctttgattctagtctgggtcttgaaggagcccctccaattactgtctccatgtctacatttcttttgttaggtgttctggtctatgggggtccctcaggcagggacgacagttggaagacaagctgtatccttaccaggtcagccctgattttctattcaagttattcctggggaaagactgggttgtaccttcctgtagaattcaggcatcagcaagaccactgggctggaagctttagtgggagtggcctgtctggatacaagaggtggggttcagtggagttgcctgccctgctatcagggtgttttcaaggcaacaggaggctgtgtccccttgcaaatccaggcagaaataggaccactgggctggaagttataacatgtgttgctcacctggctacaagaggtggggttgagtagagtcatccaccctgccttctgggcacttcccaggacawcaggaagctgcacctgctggctaagttcagacagaagtgagaccactgggctagaatctctagcaggtgttgcctgcctggctaccagtggaggggtttggtaaagttgcctgccctgctgtctgggtgtttcctgggacaagaggaagttacagctgctggctgagttcaggctgaagtgagaccactgggctagaagctctagcaggtgttgcctgcctggctaccagtggaagggtttggtaaagttgcctgccctgctgtctgggtgtttcctgggacaagaggaagttacagctgctggctgagttcaggctgaagtgggaccactgggccagaagctggtgctgagccctgtctggtaaggggaggtgaagcaatcttactgctctcaggcaccacaactgtgacctctgttggagctatggtgctggtgctgatctgttctcagtcccaagacttgtagaggtccccttggactcaagaattgcttctgtaaaatggctgggtagctctctgcctcagtctagaagtgtgatgggagggatatagggggttaggaggattctcccattcctagtcttgcacaggtccctgtggagagtgtgcccccccgccagggggctctcaccctttcccatgttagagaagttctcctggctctgcgttgagcccagacagactggtgcccagtttcactcgtctctgctctcggtgtccttctgttgccttaatggatactgacgtggtttcagagatgattggcttgcagggtcagtgttcactaacccttttgtttcttctctgtgagagcagcacacatgggctgcttctagtctaccatcttggccccctctccccacattgtttcttaattatttgcaactatgttccataaggaaatgctctcctgaatgcattccaaaataattggtgcaattcaagaatgaattccagcttacttttgtaacaatggactgggtgatttgttatctgatggattcagattttttttaagtttcttagtgtaagggtaggacctttggtctgagcctattctctttccctttctacagcttctcctcacctccacacccaatgcagcctctgccccattagctcaaagagttatgttagaggagcaaactacccagtgcttggaaaaatagtcaagaggacctttagctagggaaactattctttcaatttatttttattatttatttatttatttatttgagatggagtctcactctgttgcccaggctggagtgcagtggcgcaatctcggcacactgcaagctccgcctcccaggttcacgccattctcctgcctcaacctcccgagtagctgggactacaggcgcccgccaccacgcctggctaattttttatatttttagtagagacggggtttcacgtgttagcaaggatggtcgcgatctcctgacctcatgatccacctgcctcaacctcccaaagtgctgggattacaggcgtgagccaccgtgcccagcctcaattatttttctgttcttgacattcttgagctggctgcaggggttaatgaatgaatcaaatgggtcctggttctcatgggttacagtcaatgcttgttccatttttcttttggttgttgtgaaaaggcaattggcagaagtctcaaagtgggtgaaaataaatctgctctcacctgagacaaatttttggccctttatgtgtatttgcataaactttaattttaaaaatctgaaaacaccttaacatgattataattaccttaacctaattactaaggttgcagtttaaaatatgtacattttaaaacaaatattaaaataaaattctacaacctaaattatcctacggtgcccaaagattgctttacgagtacttgtaaggtacatttctctttaaggataatggtagaaaaaaacatttttttcatataacccaaaccaaaagttgtgatagaatgtacaaattctatttgcagttcactaagagaacagaacacaacgagaaatgagtatgtatgaacagtcgatagagaaagtaggaaacctgggttctagatttcattctacttactgttcaccaagctgatatttttatgcatatcactttcctttcctaggcatgagcttttttccttctgtgtagcaaagagattgtattagaatatgatgttcacaattctttcttctgctaccattttgttttctggtgtttgcaagaaaatcagtgcattacatggtgaacccacatgcttataactgtaagaagacagaaacaaagaaagatgacctccatctctggaggtcacctctggagaaaagggtgtgggctgaaatgatagcaattccaagaagatagaggcaagaatggatatgaaagaggttttaatggtcagcattaacagaacctctgaaaatgtcaggcattatgttaggtgctagggacataaagataaataagcctcagggtttcccctaacgaactcagaatttggtgggagaaaaaaatatgggaagaaaaaagaaattccataatttgcacagggtcaaargttgagctatgataggagcacaaaggaggcagtagtcagataacgcttcaaggaaaaagtggttcttgagtttagactgaaaagatgagtaggattgtgacagacaggtagttttaataagaaaggaaaaaatggtgcaatagaaaaatatgcaggaggggcaaggagatttacttgggaataaacctaatatgtaggactgggagtgtagtagttcttcccctactcccgttctctcatctcaaatattaggagtgtagttgaacaagtaccttctatgctgaaaaaaaggacttcagttctttctttccataaaatcacagctatatttcctagatcattttgttgacattggagatttatgaaaagtaaaagtatttgtgatctttttcaaataattatttgaagctctctccctacccttcctttcagtctgtaatgactcgttatggacacactttcttctctgtgccaaacaagcacaaaattaggctgcttaattacgcctgtcaccatttccactttctcacagcttaacttgcccagctttataatatgtcttgcttggtaggcaaagaagtggtcatcagcattgttttgagtaggtaacaaaatccaggatatccctggagaactgaactaggcttgaggcttggtgttaggcagcatcaatcaaataaatgatgacatctccttaaggatgcctccctaccctaccctaccgtaccctacttgtttcctccaacttctattgtccccttgaatgatgtctgtcacactagaagagaatctgttacagggtaacttggctaggcctggggttccccgatattttgtggaactatagcaaatggggataaatataagggtaagagataatgtctttcagtagcactgattgaatctgtttctatagaatagtaattttttttcttcctttctttatcctctacaaataggaaggtagtatttgaaggggaatttttttaaattgaaattttaatttttgtgggcacatagtaggtgaatatttatttcatgtatgagatacatgaaatgtttggatatggacatgcaatgcataataatcacatcatataatgtggggtatccatcctctcaagcatttatcctttgtgttacaaacaatccagttacactattttagttatttttaaaatgtacatttaaattattattgacttgcattagtccatcctcatgctgctaatgaggacataccagagactgggtaatttataaagaaaaagaggtttaatggactcagagttccacatggctgggaaggcctcacaatcatggcagaaggtgaaggaggagcaaaggcacgtcttacatggtgtcaggcaagagggtgtgtgcaggggaaccgctctttataaaaccatcagatctcccaagacttattcactatcatgagaacagcacgggaaaaacccagcccccatgtttcaattacctctcactgggtccctccacaacacatggggattatgggaactacaattcaagatgaaatttgggtggggacacaacaaaaccatattattttgccccagtctcctcccaaatctcatgtcttcacatttcaaaacacaatcatgcctttccagcagtctcccaaagtcttaactcattccagtattagcccaaaagtccaagtctaaagtctcacctgaaacaaggcaagtttcttcttcctatgagcctgtaaaatcagaagcaagttagttaattcctagatacaatgggagtaacaggcattgggtaacttcacccattccaaatgggagaaattggccaaaacaaaggggctacaggccctatgcaagtctgaaatccagcagggcagtcaaatcttaaagcttcaaaatgatcttctttgactccatgtcccacatctaggtcaaactgatgcaaaaggtgggctcctatggccttgggcatgactatagtcaccctgttgagatatcaacttaggtcttatccattctttctatttatctgtacctatgaaccatccttacctgccccaaaccctcccattatccttcctagcctctgataaccatctttctactctctatctccatgagctcaattgttttgatttttagatccataaataagtgagaacacatgatgtttgtctttctgtgcctggcttacttcccttggcataatgacctccagttccatcatgttgttgcaaatgacaatctcatttttatatgactgaatagtactccactgtgtataagtaccacattttctttactcattcatctgttgatggacacttagattgcttgcaaactttggtattgcaaacagtgctgcaataaacatggggatgcggatatctctttgatatactgatttcctttcttttaggcatataccagctgtgggactgctagatcatatggtaactctattattagctttttgaggaacctccaaattgtgctccatagtggttgtactaatttacattctcaccaacagtgtacagggattcccatgtttttgccagcgtttgttattgaccgtcttttggatataagtcatttaactggggtgagatgataatgtcattgtagttttgatttacatttctctgactagtgatgttgagcaacttttcatatgcctgtttgccatttgtatgtcttcttttgagaaacacctattcaaatattttacccatgttttaattggattaatatattttttccaaagagttgtttgagctccttatatattctagttataaatcccctgtcagatgagtagtttgcaaatattttctcccattattgggattgtctcttcactttgttgattgtttcctttgctgtgcagaagatttttaacttggtttgattctatttgtccatttttgctttggttgcctgttcttgtgggatattactcaagaaatctttgcccagacccatatcctggagagtttcctcaatgtttgcttgcagtagtttcatacattgaggtcttgtctaagaattaagtttttaattcatttggatttgatttttgtataaggctagtgatggggtctagtttcattcttctgcatatgaatatcctgtctttctagccccatttattgaagagattgtcttttccccagcatgtattcttggcagctttgttaaaaatgagttcactgtaggtgtgtggatttgtttctgggttctctattctgttccattggcctatgtgcctgtttttatgccagtactatgctgttttggttactataagttttaggattttttttctatttctgtgaagaatgtcattggtattttgatgtggattgcatggaatttctagattgttttgggtagcatggacattttaacaatattgattcttccaattcatgaacacaaaatatctttccattttttgatttcctcttcactttctttcatcagtattttatagttttcctaagagagatcttttacttttttagttaatttttaggcatttaattttatttgtgactattgtaagtggcattactttttaatttctttttcagattgttcactgttagaatatagaaatgctactgatttttacatgttgattttatatcctgcaactttgctgaacgtatttatcagttctaatagggtttttgtggagtcttcaggtttttccaaatataagatcatatcatctgtaaacaaggataatttgacttcatccttttcaatttggataccctttgtttttttctcttgtctgattgctctagctaggacttccagtaatatgttgaataacagtgttgaaagtggacatctttgtcatgttccagatcttagaggaaaggctttctgtttttctccattgagtatggtatttgctgtgtgtctgtcatatacggcttttattatattgaggcatattccttctatccccagtttttttagggtttttaaatcaggaagggatgttgaattttatcaatgctttttcagcatcagttgaaatgatcatatgatttttgttcttcattctgttgatatgatgtatcacattgattgatttgtatatgttgcgccatccttgcatcccagggataaatcccacttggtcatgatgaatgatattttttaatgtattgtcagacttggtttactagtattttgttgaggatttttgcatcaatattcatcagaggtaatatggcttcatatatatatatggcttcatatatatatatggcttcatatatatatatatatgtatggctttgtctggttttggtatcaaagtagtactggccttgtagaatgagtatggaagtattctgagagatgatttttatttctttctttccggggtggattctggtaggctacttaataaattaataaattgaaatgacagagcacagaagaatctattcctaaaagaatttggtgtgtaaggttgtgccttcttttttactgttagtttttgtatactggagcatactggtcccaatttaaagcccccctcaattcccattttatcaagctctgtctacttatactttgcatagttcttctttttatcttatcagtctattaatgtggggttaattttttaggggttttctaccatggcttgaagatttggagaaggacattttctagatctgattgtgacacttattccttcaaggtgactggtggtgctgttacctctttcttgtccatttgaagattgtgaaatgccattttagagagtaactgtaagacatttgaaaatacaattttctgtttgagagctcagaatagcagtcacatcataatctttcttctccttggacagtgatccttttctgatgactaggaacaagaaattggtttcattgtggttcactgtgtagcttatttaaaataatttaattttaaaagcagaaagaatacaggcttaaaagtaagattgactaaaatggataataatttctatcttatataataattgtgaagattaaatgaaataataaatgtaaaatatccagcccagtgcctcactgagtttagttctcaatgtatatttgttgaattaatgcattaatgaattggggtgattattggaaaactagatgactggttatgttgctacatgaaaatcatatgtttataatgagaaaaggccttgtactttttctgtttggcacactccattagagatcctaaatgattgtatcatagaaagcaggtatatatatatatatatatatatatatatatatatatatatatataaaattatggtaaatatagttacatcgtgacaccacccattataatttgacatcagtttggctatatttggacaaagcatgcttctcttttcaaatacagtcatggtataacatcaattactgacacaatacatttcttaggtcctgctatagaccattatgtgtactggaaggcactgaagggtttcaccatgaggctgagtctgattggtaggacctactgctttgggttaaatctaaacaggcttggttattaaagtgtcactaacatccaaatggaagacagatttatctttaaagctagccacagcacacaaagcagtgcaaatactgttagaagtatttatttgtggattggtgagatcttcacaggactttcttaattcaatttatttaagagattggtcaaatttatcgatgctggatatgtgcttgaaaggtgcaaaacttgtctaattttatatccatttctacttttaagtgatagatattctggtaatgttgaagtgatagctagagagttcttcttctaacttcaatactaattatatgatcttgggcaagctacttgctagatcttagctcgttggcagaataaggaagtcagactaacctaaatgatttgataatgtcctttcagttctatgtgtcaaatatctcattgttgagcttaccaagattttaatgctagctactttattaaagctgccagtattaaaggtggaacattttaagccataaagtaaaatcatttcttaaagtgcttttataaaataagtaattttataattttgaaaaaatatttagctaggcttatttttacacatatacactgctggtcttttatatatcttggataaagaaacaattcaatatcccaaacaatcagtgtgaatttttcaaaattgaaacaggaaaaacattctatatttaggctgaaacagtcttcacctaagtttaaatgtttatgggactttggctaagcctgtcataagctttactatattgttgatttttaaacctcaactatgtttagaaatgaatattcattattataatcattatgactgtgaactatgatctgagaattatatgtggaatgacatttttgtagacccttatgtaatagttaatcagaatttaaccttttctgttcctaaaccattagtctgcaaagaaattttctaactaaagctatttggttagaataaatagtttttttttgttattaactagactgttaataactacactgttattaactagactatctgtgttaataactagactgagaagaaaaaatgttactactcattagttatggctcaaacagtataatttgtattagaaaattttaaggccatttgcaaaagtattctccccttctgcagattgtctgttcattctgttgattgattattttgctgtgcagaagctttttagtttaacgtagtctcatttgtctatttttgtttttgtttcttttgtgtttgaggttttagttatgaattctttgcctaaaccaatgcccagaagagttttcttaagtcttcttctggtattttaatagtttcagtcttacatttatgtctttaatccatcttgagttgatttttgtatatggggagagataggcattcagtctcattctcctgcatatgcaatccaattttcccagcaccatttattgaaaagaatgtccttttgccaatacatgttcttatcaattttgtcaaagatcagctggctctaggtatgtggctttatttctgagttctctattctgttccattgatctacgtgtctatttttacacaagtaccatactgttttgattactataggtttgtagtgtaatttgaagtcaggtaatatgatgcctccagctttgttctttttgcttaggattgccttgactcttggggctcttttttggttgcatatgaattttaggattgttttttctaatttgattaaaaatgacattggtatttttatagagattgaattgaatctctaaattctttgggggcagtatggtcattttaacaataccggttcttctaatccatgaccattggatgtttttccatttgtttatgtcatctacaatttttttcatcagtgttctatagttttccttgtacagatttttcacctctttgtttaaatatattcctgtttttttttttttgtagctattgtaactgggattgccttctttctttggttttcagctagatttttttaggtgtctagaaatgctactactgttcagtgaagctaacagttactgagcagctgtctrgtcaaaattttagcaaactacttcaaaagaataatttcctgtgaaacagtgtgattaaacttgactaaatttttttgccttttattttttaaccttaatatcataaaattgtttgtcacatatataataaatataatgatgtaccacttgtgttgcctcatttatagatgctgtctttccttcctaatatgcaatgattttgtatagtatgttaaatcagaaactattgattgggtatctgttatttgcaaggcaccattattggtgctaagcattcaaaaataattagatcatatcttcagtgagcttacagtgtatcaagcaagataagatacatgtgcataattacacatgaagtttaaaatactgataaacaccacaagaaaagtgcagatcaagtgttaaggatttatattttatatctcctttagagctatgtgctttgaattctcctcagctcctaacacagagtcttacacatggaacaaattcaactgatgttagtttagagggtgagctgcgaaattattttgtaagcttatacctattcatttaatgacattcatattatccaagacaaacttaaaatcttcaatctgaatagaatgatatttatactaaaatcatatgttttgttagacagaatatggatattttaatttttgtgaataccttctatcttttcactggactcaattttctgatttctatttcaaggcccattctactaaatcttacctgatatcctactgtccagtttactcagctttgaaaaggattatggaatgtggctgtacctcttcctttctctaatgtatcagtaatcacaactcacaagaaccagctctatggaatctcagagtttatgtggtcttgccttccttaggtacaacccacttcaaagggctgtaaaataaatgattatcagagctttaaaagaagcaattaacactactcttttcctgaaaagtaattgtattattcactcaatttgaaggattcatagtcaacttttttaaaaaaaaatagatgtatttccaaaaatatgtttttctgcatttttcactagttcaagtttcccaaaggactcaagattgagtaaaattgacatttatttgatctttttaatgattgaggtaaaaagcataaatgataaccaaggactgttagcatctctaagatttcctgactctttaatactcatagtaggatatattggttatgataccagctacaggactatatagtcaacatgtttcatctcgtaaccatcttgactccattcagtatagaactttttttcactgccttaatccaagcagacattttcagaagcttgacctgtccccattttgaagacatctggctgaatttcaaaggaagatgatacaacagagtaaaagagaaaccaaaaagatgcccccctcattttgcctaagtgctagcaaagcactgactctgcttgtgactgactctgcttgtgaatttttcttgccactgagtcattacatacagaattatgaaactttaatttctttagaggcttgttatattagaaaaattgttccaaagaaagcaacaatcatgacataagcacatctggctcttgcaaattattctttattaagctttcatttaattacatgtgctgaaaggtctgtttttgattactgtaattttttttatttgtccatctgaatgatagaaatgctggaaattacattcaaaccacctgttttttctcccctactcatatggcaaagtttgagctattttctccgtggttgatgatctaggaagctttctatttattatgatagaaatgtgaccatcaaggtagtggcttaactttgattataagaagaaaagaaaatatttgaatgaagttttcaagcattaaacagtgttaagattggagtatctgacttctggttaaccacagcagattaacattttcatttattgccagttttacccaaatcctagtaaattgatggttaaggattataggtgtaaaccttcaagtagaaatggaaagagaagacaaaaaatttggaatatgagaagtggatagatgagttataactgtcttagtaaaaaagagaaagctgatacctaagctttaggagtgtaaagccaaaaagaatcaagcccagttgggagctgaacctctaaaatgcttaggaattgaaggcatcatgtatcattaaaggaacagttgtaaaaggtggaactgtagacaggatgactggttgaaaatagacataagatgatccctccctaatgtcatgcaacctggtaactaccatccctgcctcctcccttccagccccatgagcacataacctcacagaagtcactggagatttattctcttgaaaagtagaacttgagaggtttatgtcttgggacaccaggcatagctgagaatgagtgatgtgccatggtgaaaatcaggaaatctgcaggatagaccagactatgagattcttctcctgccttctcttgcttggctcatgtaatgatggcatacaagtctatacacaaatcaaggcaagaatttgaagacatctctccaagaaaatggtctagtctaagataaatgacctgtagatattgatatttgtgatttcccaatgaaaaagcagactttctgcatcattaccttatgctgaagcccataaatcaataagtctaccccatacttagaccttccagtcagctttttagaacgttgctgttatatatgaacaaacagccaatgaataccagacactttagaaaagcccctaatatgaaagagttcaaagaccttggaagaaaagagtggtaacaatgcagagaacagaaaacattaaaaacaaacccaaatctataattaatattgtcaaacagaatagagaacaggatgctataaaaagaagcaatcagagaataagagtatctttaaaaatataatggtagaaactttaaaacattcagagaagttttggaagatgaagttgcaaaaactctgtcatagagtataacaaaatgtcaaagattagcaaataaaaagaaaaaataagaaaaatagagggttaataaggaaatctaatatttatcaaatatgaatacagaggagagaaaattatcaatgaaaaacatcaaaaaagtttcctagaatacaaagacatgagtttggatcgaaaagactgaacaatgaatgtaaaagtcaacagaaggacataatagtgaaatttcagaacattcagtggaaagggaagatcctgatgcttttagagaaggaaatagattacatacaaaggaatgtatgtatcaggaagcaaaatagtgtcaggcttccttaataacaagaataggaaggcaacatatcaatatctttggaattctgaggcagaattattttcaacttagaattctataccagtcaaactacaactaagtgagaagaatattagttcctaaataattaatctcacattcacctttctcaggaagctcttgtaccaaaatgagacagttaactaaaagggaagaaaacatgatactcgggaaacaaggacaccagtacaagagaggcaaaaggaattacaagtgccatagatctgcagtaggtaggcctgaggaataaattagttcagatttggagcaagaagattgagaattccagaaaggatgtctccaagggagaaaccaggattcagagattacctgatatattcaattacgttgggtagagttttactgatttcatgcagagtttgagaattagtgatagttacataaaaattatgaaaacaaaatatgaggcaaatcttaaatctaacaaaataaaaagttgagaaataaaattaagtatagtttactacatagctattatcttcataaaataatataaaacagtaaacactaattttaaaatttgtgacattaacattaagagattggagagagaagcatgggagcacatgtggggttcaatgtaggaaagtgaaactttcattttcctttatactgtagataatgatataacatttagaatgatttacaaataaggatataaatacaagttaaaccattaaatgaattgaagggaatggtctccacagaacagggggtgagataaggaggaccagggtaggaaaatgaaggtcatcctgcaagctgtggagactgtgcactgtacattttggtcatgctctttttgttgttgttgttttggttttttgttttttaaaaccttcaagtactatttatcttgtaaagctgtatacaagaatgactttgataaaaatgaaaattatatgaaaagaggttagcccacctgtctttcaatctttggctttaatttagtgaaatcaacatattttgaggttgataatttaaagatttgtaatgtcagattgtctgcttatcatgtctcagagaagaggaaccattttaagctgagtaaatagaatgagtaataagatcattggtttgccaaagagaactatagaaaatacttcagaaaaggccttgaaacagcaatgagaatatgacgaagataaatgtggaatcccaggcaaaggcaggacctgaagagagaagtgtggtgatctgtttggaagcatgaaggaagcactttgttacctggtttgggttcagagaagcttgacttaaaaaacaacaaaactgctaccaatctggccatattctcttgaggattatgttatacgctgcctagaaataagaccctgggtaaacaatgactgccactaggccttagtggccttgggaacagcactcattattcagaaggatcagaatacccagagatgcagagtcagagctaaataagaatgatacagttcttccaagaatccttagaaatgttcaggttagtttcttaattcatgaatattaatattaaacaagtggacatcccagacatttaaataacttttaataaagattttaggcattaaaaagcatcttagaggctacttagttgaattcctttttgtacaattaaaaaaaaaaacctgaattctaaagagatcaaatcctttgtccaggatcataaagttgttgctagaaggaccagaaacagaactatggctcccatacctgtcctttttctttctgttttattatttgccttctcttagcttccttttttaaaaatagtgaaaaagaaattacaaggctgtctgagaaatctaacaatatggtaagttttttcttttgaaactcaatttcagctgcatttaaagagatcaatgtttgtcttccctgttttgcagcagctctatgccgctcagctggccagcatgcagrtgtcacctggagcaaagatgccatcaactccacagccaccaaacacagcagggacggtctcacctactgggataaaaaatgaaaagagagggaccagccctgtaactcaagttaaggtacactcgccttgcagcattgtggaaacagtttagaaaaaagtttcacaagaaagatagtgaagcaggctatgttgggcataaacagcaggaaacatagcaacataaagcaaccccaaaatgtccctctttatggtaaatttcataattgagcattgagaaacaggtgttttgataacaatagtgccgtattgtgagatctttacctcaatctgcaaactcacttctcgagagttttccccctttggattctggcttttattttttaatgatcattggcatgaattgccatgactttattgccagtctttgtcatggacttgtggcatttctcttcatgtgtcttaaacaggcagggagttaacttataggaccagagaattgggatattgaaacattagatttaaaaagaagtgcaaaatagaatttgatgtcggactctgtatggttcgttgatgaagatctctcattcaaaactagttataaatgtggacttaaagtatacttaaaaaaataaataaataaaataaaataaagaggactgtccttacaatgagggcaatgggacaaataaataaaatcataaatatgaaaagtcttaacatgatacctgatccatactgtatccttaataaatgctctttgattcatgaaaaaaaaatgtgggctttaaggaatgagttgtcattgcctaataacgcttttgatgccatatagttgtgataggataaacaggctttcccaagttatgtctgggacattaatagatgtcttctctcactaattttcagcgtcttgaaactgggcagccaggaggtacttggtgagagggaaattgatgagccactgcaattttgtgctgcagctggtacctataggtggtacttgttggttttatgattgcagttgctttctatattgaattatcaaattcaaacagaggaacaattgttttgtataattgacttatctacttggaggagtatgctaagtacaaatgctttattgtaatgtgattaaagtactgcatttggagaaattttgcaattattaaatcttcacaagggaaacagctgagaccaaccaaattaatcattggatgctatataatcactgaaattgttttgttttctaaaatttgcatatgggaattttgagattccaggaagtcttttaaaaaagtgcatcccaaataccaaagatctaaaaaagtgaaaatcactaagagaagtagtctatgttccagccaaaggaattaatttaatgccacctattcttttagattctccaaagaaataggagaacatttatgttctgctgttagaaatattgagatatgacaataggaagtttacatttaataagacagaatcacttatggaaacagactattttatgttcccagagtttgtgtttatgaataagagaacactccaactcaaagacactttgcttactcgtagttgttaaagtatgagtatatcaaacatcagtgacttgagctattgagtattaaatattttaacataaataagtcattttataagtaagttgaccaactggaactgcaccaaaccaagtctttactggatgagtaaaatgttccttggttaaattcaagtttatatctgcttttactattccatctttgtgagccagctgaattttattactcacttgaccacatgcaaattcttagagatctctctgggtaatttgacttgaccatattctatgttaataacaaaggaaatatttcttttacttattagattttttattgtatatatgggtaaaaatatatagaccaaaacataaagcaaacattttaaatttaaaatataattcatattactgaagatgttctgaaaataatcttaaagtttgctaatttaaagaactgtggttaccaaaatctctcacgtttctctttatagtcattgctttttctctgtatataacatgactacttatattaaattcagacagaatataggcaacatttgctgaaagtatcaaaaataaatatagatgatctgatgtaccttttccccctaaaacttttgtctactataactgtcaacatcagaagtcagaatgtttctgttaaaatactggttctaccacttttactagctatatcaccttggccaagccacttagtgtctttctactttagttttctcctctgaaaaaaactggagttaatattattataggtcttaaatacaccctctagtattatagtgagtattctataaatgttagtgatggtagtgatgctgctgctggtcattatgataataaagaagatggtgtggtggttttagtggttgtgattgaaatatctagttgtacacagggagagatcctaaataaacacctagaggatttccattgtcaactatgatgaaggaacaaaaacagatttactcttccagcttaaacaactaaaactcaggacaaaattgtataaaacaatggttttcagacatttacaatagtagtacaggacagtgattcctatgagaagagaaacaagtgaggcaggcactacaatttttgcagctcactattggaaggaagtttccaggcaactatgcaggaagcttcataggctccctgagtagagagacagagttcagagtttagggatgctaatgcagatggaatttgtgagacagggtaccagagaggagcaagctgcatggagaacgaatgctgaagatctgcaaaaggctgcccctgagcatttagctgagtactgatcagcacatgcatgtgagaaacaacctgaggtaaggggaaacaccagaatgtagcaaacaaaacagctgcaagattcacaaaggaccagaaatagccagagtggaaagacctcctgacacatgggcatcaagtagattccccagaagggtataacctcagtactggggaaaaattacccctacttagtggctgttctgaccttgcctaaaaatgcttagaagtaagtctagaaaaggatcaaattgttctgtgtctcagaataaagttttcaaatatttaaagaaatacagaaacttcgtcactccagaaggtaaaatttacaatgtgtagcatccattcaataaatatcaggcttgcaaagcagcaaaatatatgaataatgagaaaaatcaatcaatagaaatagaccccaaaatgacacagatgatagaattagtagataagaaagtaaaaacaactattataagagacttgcaactagagccaaatgagataagcatctgccttcctaaaaaatcacctataaagctggacaaaactgacaaaaacagtcattttggcattcttaaaaatgaccaaagttatatacaatctgagaaaatatttatgcctcttatatgtaagaatagtgggggtctgtgacattctggcctagggctattgttatttccccttctaccaggtttggttagcacaaagttgtcaggccagggcaggctgtgaggaccaagagttctgccatggtggaaagggattcacttaattgggagttggtaggtgatagccatgcccagtggtattattggttaaagtggcaattactgaattataaaactaagtaaaaaattagagtatttcaaagttaaaaaagatgtaataaactccatatgttcaagaagatagaggaaaacgtgagcatgataaagcaagacatgaaaaacctaaatcaaatgtctacagatgaacaatacagtgtttgagattaaaaatatatatatactagatgggtttagcaacagcttagacatttcagaagaaaagattagtgaacttgaagacataacaataaaactatccaaaatgaaaggcatagaaaaaagactggtcagtactgtggggcaacatcgaatagactaatgtatgcaattagaggcccagaaagaaaaggaagaaagagaaaattgtatttgaagaagtaattactgaaaatgttccaaatttgatcaaaactttaaatttagattttttagaagctcagtgagccccaaataaaagaaacatggagaaaattaagtaaacacctagcatataaatccctattatttagatgtgagtaaaggaacaaactagttcaaacatcctttgaataaagagcaaagggaagtaaattgaaattaactacataagataattttgacattcataatggatgtaaccatgttgcttgagaacctgtcctatgtataaatatacataaacgtacattgcaacgtatgtgacaaattgccttttccctatgaacacacacaaaaaaatctgtggcatcactatattatcaaacaatagacttattttctctggtagttcagtagaaaaggggcctgaaatttggagtccaataaattagaatttaaattctttcccccgttatatggccttagacaagcgattttgtcattctgacctccattttcctatttgtaaatttagaataatactggccaggctcatagtcattgacggttaaatgaactagtatatgaaaatgcttagtatgtgcttggtatataattgcttctttgcgcatgctgtttttattttctctttctaatcctccttctcaagtagtattttctggcctctctttctgttcccccttaatcaatgatattagtactggaagagaccttagagatcatctagtatcagaccctcttttcacagatgaagaaattgagccccagcaaggtcacatggttactaagggggaaaatgttctgttaccaaactctattgggtcttttaaacaacggcattaaaagctagttctctttgccttcttaaaagcaaagtgggagttaacatttgccgacaattttattttagaacacaataatgcagatcttaaaactgaacatttaaataaatatggtcatattataactaaatttctaggatgatgaaagtgttatttcaagtattttatggcaggataaatgagacaaaataaaggaaggagcttagctttcaagatcctggatgaactacagttacaagccagatatttgaatactgtctcagtgaagaaggacatgtatcttaaaatagacattctgtaaatatatgtagaaaagcatataaagaaacatcactttaaacatgaaaaataaattgcatatagcatagtatgtgtaacataattataatctatccttggtctttgcaaaaattaattttaaacatgaatagagaccagaatatagaccatgaagagtgcccacacccagaaagccacatagaagccrtgctgtggcatgtggctccctgggcaggggcctagtacatcagaaaaaggctttccatgtttccatttttaaagtgcttgcaattgtttgatttaaaatatatattaagaaattagctgcagagactatttatagctacaagaacttttcagagagagtaacacaaaagcactacagagctgctgaaattttaaataattctttgtaaatgccctaggttaatttagatccctgaaaacacattaggaaattaagctgtaatgtgagctaattcagattttaatttggcaaaaagaatgatccaactacacagttaatgtaaatagaagcataacacagggatattaatgaggtttccttccgatgaatcttcaaggaggtagataattagcttcttttgttattattgtaggagaatgtggcattgtctctgaggtgtaaaataactgtggcttactaagtgataatgtgcttcatttgtcttttgtaaaaataattatttacgttaaactcttgtaggatgaagcagcagcacagcctctgaatctctcatcccgacccaagacagcagagcctgtaaagtccccaacgtctcccacccagaacctcttcccagccagcaaaaccagccctgtcaatctgccaaacaaaagcagcatccctagccccattggaggaagcctgggaagaggatcctctttaggtaaatggaaaagtcaacaccaggaagagacttacgaattaggtaaaagaaagcaaacctgtttagttacgactgatacttgtttccaaagtgctccttagtaaaagataatactcttatcttttctactgaaacataacccaatttagtatcttcttttattagaacttttggaaaaggtcataatataaatcctgctgggatggattctttagatgataatgagttcgatccagcaaatcatagacttaggaacttctatatatggtcagtgctttgacactgagataatttttcagggacataggacctggcttcaaagcaacctttcaaaagaccaaaatttatttgaaatttttatcttctatcaaagtgtatgtgaattttacatcttatcccatatgacttttgcattaaaacaaatgtgaatgacacacttcaagaacatatatgaaatactattgatatgtaggaaaagatgtcataatgtctggctccttatactcccccatatatggccaagtatctctaggaatattcatagccctatgtgaaaagtatggaggaaaaaacatgggttttggaatgaggcaggcttggacagagagccttcattttctagctatgtgaccccaagaaagttatttaatattttcaagttcagtttcctagtattactagctcataggttattatgaggattaaaacagaaaaatgcatattaaatgcctagtgcagtttagaacctagaaggcattcaatttaaaatgactagaatgaatgattatcaatacatgtacatatataagtgggatgaaacaataaatgtgaaagcagttgtcagtaagacagtgccgaataagcattaacattattgttactatactctttgtttggaaattaagtctcttaatttgttatactctttggaaattaagagacttaatttccaaacagacacagatttaaagattaaagggacaagacctagcatttcttcagattaccttccttgtattattgagtcctgaagtctaaaatgcttatttcaatagataaaataatgtataagaatagccattaacagcttaaaaaacattcttgcctactttatctgatttgatgtttcacaataatcttatgagttagatagtatattattatgcttattgtacaaatacatacattgtggtttttacaggtagaatgagttgcccacactcctgcagctgttaattagcagaaacaggactagaatctaggtcctctcacatgttactcaagtgttctttttgtaaactcacagttagaatatttgctaaattgtgctgagtctaagtgaatcttctgatagtgagatgttaatcttcctcaatgaattttggaatattggatctctacaggagcatattctcattttgagtaaggatgtctttttgggacctgaaagttttcatgccaagttagtgatatccatatagaagatagaattaaatcatttccagcatgtgaatatgaatgccccttggccggatttttggaagttgtgagatgagggaagaaagccaacaaggagataaattatagagttgaccttgaaatagccctcctagaattcactctgaaattgtttggaaagcatttgtttgctgtcctgagtatcatgagggacagagatgactgagtcacaggccctgcttttatggaactctactcagcagagcatatttcttagatcatgagctagaaatgggctgaagtaatagcacctgtgtttgaacagcactctcgtccaggtgatattggatagagatgtcctttttaccagaaaagctccaaaataaaagctgtgggaccaaaaagtgactaacttaaaaaaaaaattccatgtatagcttgggaattttttccaaactcaaatgcatatgcacatgcattgtacacatcagacatccagtatgagcttgattctacactcatttcttctgtcctgcctatgtgaggtgtatacacacacatacacacacacacacacacacacacacacacacacgctatgaaatgattatacgagccctcaagcaagtggatcacactaacatttgtcacagcagatgaaacctatcatcaaaaaattgccctctttttgtctaaaattggaaaatcttattcaaagtattcattttacccacagtaaaatgcaagatatcgttggaaataagtcagtttaatattgaagattttccttctgtgttgcttgaaatacactggaagtaaatatttattctcactttttttttgaagctttgtagttatgcgaaaaccagtcccacacatatcgcctcattgtcatgaagtgagggagctgatcacagtgggtgttcgagctgggggtggggaatgggttgtcattctcttggtaaataactgaggcagcttgatgagaagaatgcttcattaaccagccagcaactggggtactggagagtacggtgaattccttccgccccctctttcctgcagtggacatatgaacacacagatacagatatcactaaagtacacatgtggcctcacagatttttttattttttctgcgggccagaaatgactgtgttgtattatcacagcaactataatgggtagcctggacaaacatctctgcctcctgcccactcctcaaccccttcctccccataatttccccacagaagaggcaacattgtgcaccagttgtacatacaggcagagcaaataccttcccccaatatgtatacaattggagtctaggaactgtagtctgtgaggaggtgagtagacagaatccaggtaggctggagtgctggggttttctccaagggctaaaagaacccagcacagcttggttgccctggctctgtgttctatgtatattagcgtatagtttaaaaaatagcaaatgtgcaccccttccttgttcagagaatgcagctttctacaggggaggggatagtagtagtactttttaggagtctgacctcacaagcatctaataatgcatcctgtgtatgcagatatcctatctagtctcaactcccctgccctttttggggatcaggatacagtgatgaaagccattcaggaggcgcggaagatgcgagagcagatccagcgggagcaacagcagcaacagccacatggtgttgacgggaaactgtcctccataaataatatggggctgaacagctgcaggaatgaaaaggtaaaactgcttccttgtgtcactggatctgctagacttattggctcactctcatctggttctttccaggctcccaggtatcaacctgcagccatagatttgggcttccagcttgagggctgtcttgtactttactgaaatctgtcatgtagcatctgtaagcattattgttgattaacaaatacgccctttcccacccagtgtaagttgcctcccaacctacctgcctattggtgtttttctgtcacattctgaaatagatgtatcttaaaataaaggagatgtatgatgttattagaataaaagtagagtaccagaatattaaaaaaggaagacacatatgtgtttacaatgaagactaatatgttaccatgactcaccattaaatgtaatactaaacttcctgtcaaccaggacaaaaaaatgaagcaaaacaaagcaatttgcaaattgcattcatttggtttttgatccagcaaattatttattgtttattctatgatggactctgttctaggcgctggagatacagcagtgagcaaatctgacaaagacacctgctttcctagagcttatattctaataggagaacacagacaatgaagaaataaacaattaaatagaaaatgtaatggcaggaagtcaataaatgccgtgagaaaaaatagaagcaagttaaaggaatagggtgttatagggctggcatgttagatgaagtggtaaggactctctgaggaagtgacattgacatctgaatgaagcaacagtccaggccatatgaaaggcaggagcaggggcattctaggcactaggaatgatgaacatgcaggcccttggaggattagaccagcaccaaggaggccagtgtggcaggaatggcacaagagacgacacagccggggatcataaagtaaaagtgataggctgggcagagcttattattacctggtacaccctggaaaggcttttcattttattctgagtgtgatgggaatccctagactgattttgtccaggacattgacatgatctgatttacatataaaaggatcattctgcctactgtggaagattggactatattggaggttaagaatggaaacagggagactggttgagaggctattagtagactgtgaaaaattctgattatctgatagaagggtactaatctgatcatgggggctctaccctcataacctcatctaaacctaattacctcccaaagacccacctccagtgaccatcacattgcagattggggattcaagataagggattctgaggggacacaaaaattatctccatagtaccctatattgttgaatttgtattatctgttgaagttcaaacttagacactattaacttcaaattctacagattaattttaagtatttctcattgactttttaaattcatttgggagggaaaagtctgaagtttaaaaggataaaactttattttgctttggaacacacgggagagggatgagagatgaggttaagatagatacatagatgatagatagatagatagatagatagacagatagacagatagatagatagataaatttgaacttgacctaaaacatatcacactgaatataactgagtcccagaaggtaagctgcaaaattgtttcaatggaaccagaaaaccctggtttccaagttgaagggagctgttttctcagtagacaaccttactggggttgaatttggggcatgggaaaagttcattactagggatgttgtgttcatgagctctccttaacatggtctctctcctgcataatgttactgttttgcacatatattttgtgattcttgtaggctttgtttagtatctagaatcagtatctatgattgcttgctagattagttcaagtcagaagaataaatgaaggacagcactaatggattcctgtgatggtagctttggctttcttataatcaaaatatcagtcttaattttatggggttccatggggcactactttttcttctgagcatcagattttcttctgagccaaagagggtaaatattaatgtataatgtgcaattaaactggaaaatgaattatgacaaattcagtttaactctcttcaaagttattcacgttggaataatctgtttccttaaatataagatctatccattagatttatgaatttgttctttgtagctcataatacagttgtaggtaattttttgtggtgttgctgacataaaaccttataatttattaagcatacctcttctctccctcatttggacactctttgcagaggaatgtggcacagatttgggtttcctgggaaacaggtcatgagatgaagatcagcatgcaggtttattagggagtgcttttagaattgctaagggaagggagaagacaaaagcctgtacagcatagtgagaccccatctctaaaaaataaacaagttttaattttttaaaaaaacccaggactgtgcagagggagaggttgtactctggtgcagtctcaactagggtctctagcaacctcataggaagcttccaggctgccatggccattcagaattgtcctaagttggggtgagagtgtgagcttttgtacccctgcatcaaccagtcattggataagtgacgccatgggaagaggacatgaccttgagtgaggtgactctctccagctaaggcaatgctgaagagggccgacagccaagggctagctaccaacagcatttccagcagctgagggaataaatcttccagtcctgaagcagggggggatctgtgctgcacatcagtgtccactgtagcttgttacatttagtaatattagatgtgtacaagacagtctttgtatatatcataaatgtgggccaacacttactaacaggcatagggatgcttatgtctttacagtacttatagaatcatatatgtgtccatatgattacacgtttactcatgatgggtctcactgtattgggtaaatccctattttggcactttaaaatgaaacattattgacttgattggccagcacggcaccagtggagtcattgtcgactgtgtcgatgtgtcacggggtatttaggatctgttaaatatatacattgtagggacaatagactgtaatggcaccttatgagctattctgctccatcgtttcaacatagcttctgtgcatgaattgtcagtgtcctgccagcagatgtctaagttaccgccctgggttgtagctttccacacaaagaacaccagccatcttcaccccagtctaagtaccagtgcaattagatcatactatagcctaattgcttaccaaattttgttgttttgacatctctaagatagagagtattttagtcatgacaatacataacagaattttaattaggctgcttctaagtctcctcagagctaagctaagggcatctggcaagaagacatgcaaggcagggtgggcctttttaatgaaggggtagatgttaaagtatgttctgtaactctctgaccttcttgatgtttgaatgctgactcagtgaaagcattggttggaatgctttcctgcgtaggtgttatgtgagccagtagactgattacctactgatcacaactgcacatgaaaagtcagattgcacatctgtacacatgtgtcctgagctgctattcacttccttatctgggaatcacttgagaaaaatacttgacctcatcaggtgtcaaagtgagctacagtggacactattatcacactttacttgcctctgaagtatatgggtagaattaaaactgtagagtaaaagaattggagggagcattacatttgatcaagttcaatcacttcaatttgcatatgggaaaactgaaacctagagagagaaaaggacttacccacagtcatagtgtatttgtagcaggacagaaattaaatctcagctttcctgattcctagttaattgtatttccacttatagaacaataccagattcatttattaatttcctatgatatcttacattttacattggcaatctcaaagctttgatgaaataaagcaggtaataaataaaaacagcgaagcagaaaagcatttagctccctgctttctctatacttgtcaccttctacctgggtagggtattctttcctgccatggtgtccgttgctgctggcgctggaaagctaccagtcaggaaatagaggattgaatggtgctggtatagacaaagaaacaaaagaggtggctagaccaacagcagtcatagaaagacagactacatgtagattacaaagaacatggattttagagttgattaatcctgggtctcagttctccctgtgctattttctaactgtgttacttaagtaaattatttaacctctctgagtctcaatgatcatttctataaaatggagataattaccattttcttgaagggatgttttgaagaaaagcatatgtacagcatatagcttgctcagaagatgctcaattaatatcacattctttctcactttcagatggcaggcagcttgtcaaatctgttgtttagtttttaaatttttctttctttgatactctccactagtgaatgagtcaacctattggtccttggatccaaaatgtcttaaaagagaaaaaaaggctagttagattctaacaggcagcttcttacaaagtcaggatatgcatatttctttttcatttttggagtaacttgtataaactagctacctgctaggatctggctaaagccaacttgataataatactcaaatttgattatgttagtgtgctagggagcttttgttcctacttatttaatatattctttaatatgtttccacaaaagcagaattttaatctataatttttttagaaaagcttgacctgattcttgatagctatttacatttcttatacccaaatgatatttttcagtgaattaaataggaaaacaatatctaatcattggggcacattgtaaacttgttcccatttatttaagaagccattgttcattttttgaaagtgtagattcttgcatttcacccatatgtttcaaaaatatcagaatagtacatcagtattacactgatgtaatactgcccccttttattggaaaagaaaaacatactggacatcttctgcttcgcattgtcaattaccatagctccttgttattcatacaattgattcaggtattcattattgcatgacaggataaatttagacagaggatcaatatagctgtacagcagtaagtgaaaggggcttgtgagaaaattatttagcaaagtgtgttgggaatgaatgagctccttctatagctcacagactagtgaggtttggttgttttcaaaggcatatatagtcctaattaatcaggattgtcatttttgtgagcagttgactaacatgtttgtgttgcttttctatgtcaacctattctcaagacaacaacttgtactatgaagaatgcagggcacattagagatttttgcagtaagggaagaaattctaattgtaattctcatttgcaaagcagagcagtagtcactgtttaaaaaacatttgtgtactactctttctttatgtcacgacaatgaatatttttatactgctttctatgctccaaatatattattacatatatattcgctcttaaacctttccaaattcagggatgtcggtattactgtccttgtttcacagatgaagaaactaagaccagctcgggatcactttactccagcatttcctttccatcatctcatttgttccctacatctctgtgagattgatagcgcaattttacttaaaatctaaaacaagacacacatctgagtttcaaacatcaatttaatgaagtgaatgctaaaattatgagctaaagaagtctatctagatatatgtgcttcatacatatttctttgaaatgaatagctatatttatacttgcgatagtgtttttttaaaagaacatacacagatcaaaagtgctataaaattagagaaaagcaaggtaagttttattaatgttggattttacatttgaactaataacattgggcaactgtgaagttctgtatgtaggctcctggctgaatgtaatcattaagttctttttctttctgttgtcaggactacttgattggttgcctagctactagcttaaaaggccaaactcataaaaaacaacaacaaacttgtttggctcttttcttctctgtactttaaacaggaaaaaaatggtgagaatttatatataagtgtacaagttcaagatccttcctagggataggtgtaggtgtaggaataaatataaagccttgagttttatttatacatgttttagtcaaaaggccacatctagttaatgtatctctcaatgaaatggctaaaattcgatatattcagttaataatgttgcatacattctgtgaaagagttgttggttttgttatgtatggagcaaacttactaattatgaggattttatagacctaacctcccattatggcaggtagtttctaatccttaatccttctagatctaatctcttctagatgtaatctcttaatccttccagaccagctgttctcaacttttttggtctcaggggccttttacactcttaaaaattatcaaagaccctgaagagttttgatttatgtgggacttatcaaccaatatttgtcttattaaatattaaaactaaaacatcaaaaaatatttaagataacaataacaaatcaattaggtagtaatataaataccattttttagtattaactatattttcaaagtaaaaaaatagaagaatgtttttgctttacattttcatgaatctctttaatgtctgatttattagaatactgcttgattctggtatctgcttttgcatccaaattgtatcattgtcatgtagtttctggaaatctccatcgtacattcaagagagaataagaatgaataagtcaaacaatgtcttagagttattatggaaatagttttgatctagtggaccctctaaaagggtctttgagattaccaaggtgatactttgaatatatgctattctagatcatgtaatacatacacctgcattatgtgttttaattgtattcaccttaaccttaataacagttttcactgatcaaacacagtaaaagtttagaattgaccaatggctttgttctgtttgaattaaggagcaaaacagtacagttgtactatttgtgtttatacgttgccttgatgtaaaaagaattttgggtggtttgcagtgatacgtgcagtaaaacaacataaaaactaaatagagaggagattgtgggaaataaaaattaaggataggaaaataaggtaagtagggtaaagctgagataagtgaagtgcacaaaaattcttgtcatacatatttacctaattgctaaaggatggccacagactcgattgtgagcttcctggtaaccaggcaaaaaggaaatgtgttacaacagccacagtatttctacaacataaacaaaacagcttctcagaagagacataggtcttctctgggcactcacaaaagcttcagacatacctaagaatgtacctataacattcctattcagtttgagaactcagtaatttttcagggctatttcttaacagatctttcatttatcttttagatgcatttttacctacagttatttgccttagtttaggtaatgtgactgacattgaatacttgtttgcagcactttattccacagacacactttttttcaatttcattccatttgtattaagtacttactatatacaaagcatagtattagacatgtgaagtggaaagataaccagggctcaatactggctttatcactgttatgctaatatctcagagcttaagtttcccaatctataaaaatatcaggatttgagaattaaatgatttaatattcaacctcctaataaaatatcttctgtacaaattgggcatttaataaattcttactcccttcctccctctttcccagtcttcttttcctctctctcccacctttccaccttcccttctttttttctttccttcctacttttccatccatttaattaagtttgttgataagagcaaaggctttggagttagatggccctaacatctccatctgagaaatgctattaatttgcatagtttctatgcacaagggtttgttatgatgattcartaaagtacaatcatccgtcaatactcttggagaattggtccaggaccccacctccctaccctgcagatcccaaaattcctggatgctcaagactcttatataaaatggcatagtatttgcatataacctaggcacatcctcccatattccttaaatcatctctagattacttataatacctaacacaacataaatgctatgtcaatagttgttgcattctttttatttctattatttgtattgttatttttaatttaaaaaaaattttaatattttccttccaaaattggttgacctctcagatatggaactcatggatatgaaaggcctgctataatcaacataagtggcctcattcagaacctgacacataattggtagaagagcaggctgaaagagatggttgtcatggctagcttaagttttatccttgtagataattgccagccattgtaggtgtttgtggatggggcacatttaatctaaactacattttaagaagaatatgatggtggcagtttaaataaagaatgggcgagacctttagagagatgtgcaagagtgaagagagcatgtgttttggagtcagagtgaccggggcttcagattctgcttccacaactcacaggtctgtgacttccttgagccttggtgtccttatctgtgattaataacacttagttccctgtgttattacaggttatatcaaaaagctatgaaactataagccaggtactcaggattatgcatttaaaatccattttcttctcttgcagcattcccaagaccagttctgtaggtggaactccatttgaaatttctttaaattggccttgggctcttttgcactcctgcccttccttagcttagaagctgccctgttgttgtagaaacagggcttttccagtggaaagacaaacagtatgcagaggaaggacatatcacaagtttagtgtcaggtgacttaatgctatgtcaccccacataaacaaattaatttctgaagaattcccaacctccaaattaaatcagacccatctaggtggcctttagaatccacttgttgtactaaacattttttaaatatctgagttgcagaaagaaatcaaagcacatgttgtcaggaattttttagttatttttaaaagagcacattaaagaaaatatatatagttatgattatcatcaaaacaaatattaagtttgaagtcatttgattgtaggacaaattttaaatacaaaattgagaccatttaagtgacaaattatatttttaaaagtctgctaaaacttgaacatttaaagttgggttcagtttaaaatgcaactttagaaaggctgagtagattctaaactgttttcctaagttttcacaaaacttctcaagacaatgcaagctgcctcctaagtctaacaaagaatctgtctaagttcttatttttagattcctcagagaagcatacgcgatcacttgaaaacacactgtgttgttttactgtgtgcctgcctttaggaaactgggtccatctggatttttctgagctaagaggagggtgctctgcttaaaagctatctgaactttctgcagactttgacatcccatttcatggatgttggctttggtatatcctgaagattttcctcagagatctttgcccttgggaattcgggatctaatgtgtgctctgtctaaaaatctcttaaccaatttctattcttacagaatcataactcgtccacattatctctagtccagtgatgatgatagatcttttccctttagagatatgaaatatgaacttctttgtttttgtagtagtatagtaaaaattcatatattcaacactctctcaacagaaagaccattagtcagcacttcttcatcacactataagaagagttgaatcaggccgggtgcagtggctcacacctgtaattccagctcttttggaggccaaggcgggtggatcacctgaggtcgggagttcgagaccagcctgactaacatggagaaaccctgcctctactaaaaatacaaaatgagctgggcctagtggcgcatgcctgtaatcccagctactcgggaggctgaggcaggaaaattgcttgaacctaggaggcagaggttgcggtgagcagaggtcatgccattgcactctagcctgggcaacaagagcgaaactccatctcaaaaaaaaaaaaaaaaaagagttgaatcagagctaaaagagcccttagagatcatttagtacagccgctcattttatagatgaagaaacagaagtgaagtgattgcccaaatccagccacagggtgttactgagactgggaccagtcctctgtctctctggcactcagtcctgtgtgctttccagattctgctctaatgttcacggtcctaagatgcttatggtggtgaccctaaggcatcatatggtctcaaagtgctaaattcagtcttagtgctgcttatgttgttctatactatcatccttgctaatagagataagtatggaatatattgtatctgatagcttcactaatcagagtgtaggttaaatagaacattacatttcctagacatgcctggcacatagtaggcactaaatataatattaattgatttaagttgatgccagtaacacaattttctgtaactacattttgtataaatatttagttccctaaagatcaatttttaaaaatagatttcattaagtgttcttagtaataggtgaggtggataatactttaactttttcttttcctaagaggctttctttgctcgtggcagttttaagaacataataataacaatcactaaaatgtcagtgttttaaattgtttgcaaagcatttcacacatttattaattaaagttaattctagcaaacatcctaagaagtggaatttttattatttctcttctacagatgagtatgaggttcaaagagctcaaatcattttcctacattcacacagttaatattgaacttgagagacttcaaagttttttgttttgaatcccatattctgtctgcaataacagacggacttcaccttcttcccccaaacctatccctgcccatgtgtcctgatgcgccttgaaaagaaggtcacacattatatatggctgtacatgagtttgtgtgtgcatgtgactgcacaatgcgtgtaactctgtgagtgttcatgtgagcaaactttgtgaatgttcatgtctttctcattgtgggtataaatctatatgtgagtctgtctctgtgagtctgttccttgtgtgtgtatgtgcatttattttgcctgtttttccataggtctgtttgtatctatagaagtgggtacctgctcctgctgtgcgtctgtctatccgactatgcatctgtagtgtgtctgtgtatttgtcagtatctctttgtgtctgtgtgtctatctcagtgtgcacctctctgcatttgtatgtctgtaggtatgtctgggtccatgtctatgtctgtctctgaatctgtatgtctgtctgtgtcagttgacctgggtgtatatgtgagacggtctgtatgacagtgtatgtgtgttgtctgtataagtcttcgtgtatgtgttctactcccttccctttgtggtgttgggtattactatacttgattattttcattttcagctggttggcctagggctgtgaatagagagtatatgtgaaaactttrcacatggatgtactttatatattctttacatcactgattccctctcagcattgtcttaaatctggttgtcaaaaatgtgccattgagagcagtctggcagaagtttacttttagctaagatccagtttgcaatctttgacatttgcaactaagattagaatttcccaaagtgctgtcttcccactatggatggaaatgcttgattttatttttagtgcaaccctgatttgccctttatatctttttataaataatgtcaacagcattggttctgaaataacacaaagggtgtcttgtaaaatgcattgcgcaatggccttagttctcatatcttctaggttgcagtagtcccctgtagttctcaacaaaggagatcatttgaattgttatcttcccatattgagagtcaacataattttttaagaaaagaaaccatatatttggggttctcttgcctatgttgagattaaaatatcaacaattaaattagtatccattttcttatctgtaaaatgggggcaagaagacaaacctcatctctagttcaaagaaacattttagtgagctcttacatttacaaaatcacattggtttctcaagtcctttctgttcttctaagaacatgagttctctgcttctttttcttttcttttcctttcttttctttttctttctttctatttatttattttttgtttgtttgttttggagacagagtttcgttcttgttgcccaggctggagtgcaatggcacgatctcggctcaccacaacctccacctcctaggttcaagcaattctcctgtctcagccgccccagtagctggaattacaagcacctgccaccatgcccggctaattttttgtatctttagtagagatggggtttcaccgtgttggccaggctcatctcgaactcctgacctcaggtgatgcacctgcctcagcctcctaaattgctgggattacaggtgtgagccactgcgcctggccgagttctctgatcttaataatactccttcaagggaggttggtagcaagtttagcctttcttattccagaccaccaatttgattgccatgaaatgatttctccaggtctaggcaaacatcaggaatgaaataaagaacaggagcctttgaaatcggtcatgtctaaatccaaatctcagcttctcagcctaattaatgatcaacaacatgtgtattactaggtatgccacctggggcctgttacttacttttctgagactatgtttactcacttgggaggtggaaatgatgaacatactgtataaggttgtggaaaatattaaataagataatatatgtgaagtaaggtagatgcaaataaatattcttctggttcccttattgttgtttgcaaccacatgacgtcacagagcgttaggtaggaagtgctcaccatttgatgtatgggttaggtgttaggtgctagggattcaggtaaatattgactggtctctttctgacctacaggagagtgtagtctggtagtctgatttgggaggtaagacagatccatgaaaaggaaccagacaatagagggtctgtgtgccaaatgagtgaatgaaaagtgtcgtaaggctaattaagctaatgaagataaaaggaggccgtcctgatcaatcccttggtggaaaaaaagttctgtagaagaggagagacttgaaatgccctcaaaggaaggacaggcaggctggagtaggtaggcaggagtgtctaggcagggtcctggcatgagtatggttggggcatgtgtctgcatatggggaataatggctggaggacagctcaatcaagagagaagtgtactctgagttagagaggggcaggattcagatgatggaagccttgaatgcctggctaagaaagttaacccagaggctgtatgtatggttgtatgtatgattgtgtatgtgtgagaaagagagagagagagaataaaggataatgatggtagtggtggctgaggtaaatggagtgtatttctccacatagataaacttggagacagtcaatctgttacacaattatagaagcaactaataagttgctcccactcttctctctgggagaaacctcagggtgatataggattgtaaatctacatgaaaatttgaaataattaacataatttataggcatttgtgactgatgaatttttaatacaaaaatcacatttgatgttcacagaaatcctgtgaggtaaagattattgatatcttttattagcccccattatagactaacaaatcgaacaaaaccctgaaaattcatgcaggtaactctaggttcaaataccagctctgctctatataaattctatactttttactgcaccacactgttaccattattggtaacttgaaggaagagcccatgtcttactctttgctcttcccctaacactgagcctaaaatgctcattgattgtgtgcttgtgactagagcccagactttggaagaagtagttactcttacggagatgaaaatttattttcatctctctgcccttttgaatgtgtctggcattcctcagatagagtaaattcatattataggagggttgcctcttacaaggccctagaatactgaagtctgtttcactgtctcaatttgcttgtctcactgccacttcctcatctgtcttctattctggaggttgtggatgcatcgccctcggtccacacttctttgtctctgcctcctggtatgtgtgagaatagatttctctcctttcctttctccctccctaacctccttcctaccctctctttccatttctgctcccccattgccctttcctgttccccttgttcctcttatttttccaccctccctctctccttccttcacttctcactgcaatcttacagcctactgcagttagggtgcagtctctgatcattgatgatttttctgcaagttcttatagttacaggaggcagctgctgcctctgcattcttctatggcagggctctagtgtgtaatacctgcatacctacctaccctactcctgtgtccttgatagcagcacagttaacaggagctcttgggtgtgcatctccaatgataagtcctctaaagccgcataagaattaaccatatatgaaacagttgcacagcctaggggggctgagagacaaccagtacacatttattcagaatcaaatgctgatgtcatttatttaaatggctgtgcaatgaagtactggatttgaatagcttcagaaagttaaatttataaaataaataccaacttgcaaagctttggaagtgaacatggatgctgagcttcctgatttcatgtacctaaaactgagtaaagtttgacaaatgaagctatgtgaatcgtagaaggaatttagtcttgatgttaaagctggagatctgtcttctaggcctacatctgagtatctgtgtcatcttggggaagtctctaaatcttactgagtctcagtatgttctgtaaaattaggatgattgtgccttacgaattagataatatgtgggaaaagactttacaatttataagatgctaatggccacaaagtctgaccatttaccatatttattgtgtgaggaggaagggaaatgagtctgatttctgcccagaagggaagctttatgctgtgtgcctcctgcctcctgtttcattggaatgaggtagactcaaagctgccttaggctgatagcataaataagtagcatgtcatcacttttttttccataaataaaacactttttgtttatcatctttgtgggtggtggtgagaaggagagggtgtagaaaggaagtgaagtctatttcaagcaaatcaggtcggttgtaccaaatatctctggctcaaagaattagctgaggactgaggattagctaaatgtagatggatttacagatcagcataatacaatgagatcaaaacactatgagttagtgaatttcatatggttttgtacaaactggttttccagaatcatttcctcaagtttatataattttaaaaggtaatttaatgagctagaaattttctatagttgatatttgaggcagtattaaatattgctttaccttcaagtagaaaccatactaaagagaagtaaagtttgcagtcaaatcagcttacacagaaggcaaactatgtaactgtttagaacaatagacaatgaatttttagaattttgtattatttttagttgagaaactataattgtcaatgaattttaaaataattgaaagtacaagtgtgagtgcttcaaacatattaatcttcaagggaagactaatatttcaaacctaagcatttctaaatagatcatatttattcaaacctaagagtttctaaatagatcatatttacactaagactttatttggtttaagcaatctaataatccaccccttcatgtcacattgccaattagagaacacaatgtacaacctgaagccttatataagtgacattttaatattcagatcccgaagcagtcgagaagtttggctctctagaagcaatttttcttctactcctttggtcatcacctcagttatgcaaaattaaaattttgatcataacgcaaattcaaatatgagttttatttaatcagggtgaaaagcagatttactcctttcctaggttatacacttctttgtgtcaaatatatgcagtagagttaaataagaggtatattataaaaacttttgtagcttgtataattattatattcatgatcttctcttaagtcattaattggtctgaaaatgccattaaaaattttacagagatttaaaaacggctaattataacattcacttgggaagttatttgttctatgaacaactgcctttttccctgagactgttcaaatccattttagttaattctcgttagacaatcggttttttttttgtttttttttttgagacggagtcttgctctgtagcccaggctagagttcagtggttcgatctctgctcattgcaacctccgccttccaggttcaggtgattctcctgcctcagcctcccgagtgcctcggattacaggagcccgctaccacgcccggctaatttttgtatttgtagtagagatggggtttcaccatcttggccaggctggtcttgaactcctgaccttgtgattcacccgcctcggcctcccaaagtgctggaattacaggcatgagccaccacgcccggccctcattagacaatctttaggactgaaggaactgtctctcggtctcacatcctgcttaggctaattttccaagtttctccttatctgggcagaagtgctgttattcaagctgtaggaataaacatgtgcttgtttattgagcccatgtcctagagcccttggagatgtttttatttcacttagagattttaacctgtgatctaagcatcatttctaattcagcgggaaggattgtttatgttgaagcacttgcttttagaccaggaattcagagtccacattttaaaatatcttacattttattttttgagaaataaagttggtgcagtcgctacccttgctggtatgacctacaatgtgctgcatttcagtttctaatttctgaatgtgaagatgacgagccttgttttttcctaatataatgacaacaaacacaaagctctacccaaaatatacattacattgtaaatatttcaagtttgtgccagttaaggacagttgtgaaggacaggtgatttttattctatttacttatttattttcaccattgtggaaacagtggaagggaataaaagcactcgcacccatccgctctgtttgctggctctctgatgacaaacggccgatatgtggagagcacatacctcatttacatcagatgcataatgtactctatctgggatattagcttctcggtcttgcagtgttgcctaacacacacagtgatcagcacattttttgagactgcaataatcagaggaatgtaacagtgatgtgggaacaagaggaaataacatggaataataatgtacccatcattgttctgttgtcatccctcctagccagtttggtttcccttagagcctaacaaaagcttcacgaattcaatggaataaaacatggaactgggtgcaaaattaatacatctattcccaagctccatattcatagaaaaaaggaaaatattgactacatagggaacagactttccctgaaagctttgtggatctatgcatatgcttatgtaatcttcaaacaagttgtgcagccttttacaaatgtgtctagcctcatttaatctcaagtaagcctgtggataccacaaaggaaaaaaaatgaaaaaaagtcagatgtaggaaataaactaaatcttcaaaaatatgcaaaatataagttcccaataaaatattatctgctacattaattagcaggctgtgtacaaaatttattcttagcatgctaacctcttcacggtttgcacacattgactcaaataatgtcagagcagttttcactcatattgtccaagattttatcaagagttcagtcctgcaagtattttacaaagtagttgcatgttcctgttctataactgcttgcagtattcccaaataagtcttacacatgagttcaataaataattggaagcccagatgtttgaaacggatatagcagatacactgtagctgtatttaaaatacagctcctttccctttgtcctcccatcaacttcacagcattgcactctgccattttcagttctcttctaattaaatctagatgcgcggtgagcatgtacgtgttcccacacgtgcccctctctcatatgcagcacgtggaggcatcctgtattattgttgctgacttgagacattccagcaaggaattctgcttcttcaaattgaactgtagcattctttgtcccttaagctcacctcctgataaggaaattacttatattgagacatgacttactgcttcacatagcaaagaactaaaaattgggtttaaattcctgtcttgaactgagcctgactcatttctgtgtctctctatagtacgactaaagcaggctcttgtcccgtgtttgataaataaagtaaaaaatattaggtatcagtaaaaactaagaacattcttgaatttggttttaaaatatagctgcctgattttcaggacttgaaagaaatgtgtaggaaatttcattttatttactatacctttagtttattaaatttaacatttttgttaatatatacttctccatccctatgcagttttttaccttataactaaaaatgatgatttctaacttatatatcttagtttttccctctttgaataattatactaattcctgcaaatgctgtgacattatcagagaaaagttgttttatttttattgtattttttaagagatagaagagtattatcgttacatttgggaattcttaatttgtatcttatttagtctggtgtgcaatgtgacaccagttaattctatgttattttatggtaactacatgttaactctgttggaagtaatggtaattatactgtaattgatatcagttctcccacatctttggaaaaccatacaattaacacatatccccacagttggacactatcttttgtcttttgtaatgrtgccatattggagtactgttttgaaaagcgtttctaaatattttcttcttcttttaaactcattttaaaaatttcaatttcagaatttttttttagtttgtatgaaatgaaaacagtttctaaattttaattttacttcatcttaagaaaagcttcttccacaatcagacatagtcctgggttatttttgttttttatttgaatactcatttgtgacatcatttgaccttatttagtgcttcttttttcctagaaggaggataacagtagaatatacaaaatcttgacattaaggagttaatcagcttttttctgaagaaaggccctcttcttagcagcagtctttgcatttatgttactttacttgcagacaaaaagagatgtattctgggctagtgccaccataatgagtctcaaactagggacacagaggaatctttaagccacattcagatgaaaatgtgttccctctgattttccctgcatcctttccctgccttcccttgcctttgtgtcccttcccttctattgcttttgactatggtggccacggaacttcagaagtagccaacagatgctttttggctaagggtgaccatgctttggtaggcttgtttgaaaaaaatgcattgttttttagtgcttttcttgagatgaataattcctcagaatttttttaggcgtgattttatcaatgtgtgctgcagtatagatcttagagagaaagaaagtcaaatatcatagaatcataagatttcagagctggaagaaaccatggagataagttaacttaactccctcattttgcagatgaattatacagggactagcatagttggtagagtaagagtagctcagtggaaggagcaggagactgagagtctggagctgagaggcatgttctggatctgtcaccagccggcttcaggactgtggtaagtgtccacacctccttggtcacattgctgtttgaatgaagaggccttacatttccttctggcactaaagctttctcatgctccctatttttctttttaagatatatgttatttgtgcagcatacatatttttttaaattataggaaaagctcttaggagatacaatatgcttatatatatcataaattaaaacaaatacatggtagcagtaccttacattttcccactttttgtgtttatgttyctgagggaaaaaaatcttcaaatttatcagttttccagctaaaactgaaatggaagctatatttctaaagaaaatatttattcttggttcgtatagctttgatgttttcaacttgaataaactgcacttgtgtttccacaaataatactaaaaagtacacattataaattaaacaggtacctcagatgaggcacttagattttgaactaatagaattcccaagatacctttttggacaaagacatttgcttagctggtcattaattttattgtgacactctttgttcatatggtacatgttagaataacagtatcttattggtggtttaggtggagatagaattctccactttttaaaccatgtgttcagttttaataggagtttgtgtaattttacagtgggactttttgtgaactttttactgaaacaaatggttaatcagagaatattcaggaacaaatctgcatcatgcctctgtacacgaataaaaagttgaaaccacatataagtaggagttaggctgccacacaactggatttgcttaaatctgaacactttataactctacttgggagttgcaaacttataaataaccttgcaattggttaaaaccatattaaaaccatatgaatgagacagaaagcatttggttaaaggggttcagtaagcactataatcctgatgaaactaatttaattcagtggcttccaagcctaaaagggtctcatatcttcagagttaatgctactgtatcatttatcatctgatggtcagtgacaagagtctaaatgtgtgttacaggagatgtctaggatgctgtccttgccgggggtgtggagacagaactcgcttattttggagtactcttcaaatcctgagggaaacttgtcatacatcattggagaatgtttttgaaaggtccataaaacatctccacaagaagctctgcagacattagttcatttcagcaggcatgtgctgcatgcttctctgcttgcagcgcacagttctctctgggcatagagcaggtcgtgagatactttccctccctcgaaatgcttatggtccagtggcatatatcagcattcctagagtttatctcaacagcttatagcattgagattctgtttcttgcctcaagtataaatcttcctgtttttgaaaacctttgttaagtgcttccttccctttaaaggacaacttttgaagaatcatagataaatatatagatggatggacaaggctgtcaacagatagaactgctactagatcctaaagaaaaaagtttctagataattgtttgtgaggctaataggaccttatctctaaaatatgctgctttattatttgataattttggaaagcaactagcacctttcatggcataagaggtagaagctgccattgtattagttggccagggttgccgtaataaactaccagagacagcggacttaaacaacagaaattcattttctcacagtactgcctggaagtccaagatcaaggtgttagcaggttcatttcttctgaagcctctctctttggcttgtagatagaggctgtcttgatgtgtcctcacatgctctttcctccatgtgcacacatccctggtgtccttttttgtgtccagatgtacccttcgtataagtacaccagtcagattggattaggacccaccctaagagcctcattttaacctaaccactgctttaaaggccccgtctccaaatacagtcacattctgaggtactaggggtacctatgaattatggggaaacacaattcagcccataacaaccatatttactcagcttggatatttccaaatctcgtgaagttatttcactgggattacagtgcctaaggatctcccttgaccaatgtctttgtttgcatggctttaccaggattatcttccctaggaatgttcttgtttctcaggaggaattaaattgaaattaatataattctgttgtaacagtttattctattaccctttcataagagattggcctttttaattaattcaaagaatgaattgctaatggtgaattgctaagcaatgtaagagatgtgtaaggatattttttgtggagatggttcagattttagggaaaattcttcttggagagccctttctagtgataataataaggcagattttctgtatcacagctctgggccaaccctgaccaggagatcactctactgtttaattgacttacacaccttcctttgtatttatctgtcttttaattatttatatttcactgctttaaataggatctgaaaataattgcattttatttaaaagtaaaattaaaatggaagaagaaagagaagcaattttaccaagattaccaagattaacaaccagagagcctagtatgtgcaacatcatgagaggcacttatgttatagagataataagacatggatactgtaccttgaggagcaagttgaggagaactggaaacagacatagaaaccaataattgtaatatatatttttctataaatgtggtgatggaacaccacatttggtgttagaggaaaggggttaggggtgttagaggaaaggggatgatagattcttcccagggctggtggaaggaagtcaacaaaggattttgtccagagcagatgttttaattaggcttagaaaggactaattatgatgtcatctggaagggaagacatcataattagaaagaaaaagtggcattcggaaatacataggattttggaatatcatagctagttcagggagctacaagaaattccattttattgtaacagggagtataaactagagtgaataggatatgaagctgatgagggagcaggagccagatcataaaaagacatgcataatttacagagaagtttggttcttatcatacaggtgaaggaagacttgagtgcttaaaagtagtgaataattatccagctcctacatggttactaaggttgagatttaaagttacttctgagttacttagcagccaagataaaatggaaagcattgattgggcgcagtggctcatgcctgtaatcccagcactttgggaggctgaagcaggcagatcacctgaggtcaggagttcaaaaccagcctggccaacatggtgaaaccccgtctctgctaaaaatacaaaaaagttagccgggtgtagtggtgtgcactgtaatcccagctacttgggaggctgaggtaggagaattgcttgaatctgggaggcagaggttgcagtgagccgagatcatgccactgcactccagcctgggcaatagaatgagactctgtcaaaagaaagagagaaagagaaagagagagagagagagagaggaagggagggagggaggaaggaaggaaggaaggaaggaaggaaggaaggaaggaaggaaggaaagaaggaaggaaggaaggaaggaaaaacaaagcatctttggttatgtattgttctattgttgatacaggagaaaggatattgacctttggataaggacactgtcatcgtagtttagctttgagatacttagcaacattaagtaatatctttaacagaagtggatatgttatgagttgctgtattttttgcaaagcactcacatgtataatctctcatttaatcattaagcccttgtggcatgagcattgtctattccattttacaaaggggggaacaggctcagagagatcacatggtaatctagagttattattcaaaattcaccccagtacaaatacatatctaaattttgattaaatgacttaacccatataaaaattctttttgaacctcaccttcttctggttgataacaatagtattttctctgtagtattggtatgagattaaaggaagtactcattggaaagggctttgcacattgtggatgatcagtgggtggcattcttccctgcttctacaccagtagatatatttatgctgtgatggcaaacacagttggaaaacagcagttagtccgtaactaattcttaagtgctagcacaattttggtgttaaaaatgtatgagaaactagacaaattaatagctttagctgaaaaaatattatttaaaaatgaggttcaataatgaacctcatttcctccagccaaagtctatattatcatgattacttactctagaaacatcacaatgtcactaggaaagtaagtcctatacctctaaaataattccctcaaaatataatcacctttaaaagtacatgtggttgctttccagtgtaaagcctacatttttgatcattcattaaattactaaatgcataataaaggatctaaaataaagtataacaaagtgacagtgtttgttaagtcaataaaaaggaaaccacatgtctggttaagtgatgtttctggagaatcacagcatggcaagatacgtctagaacaaggaattaaagaaagtcattcagagtaagagacagaatatctcttagcattgtacttagcattgtcttgctttcaaaacaaaacaaaccttttattttgaaatgtgtacttctttttaagccaagcatctatgatatgtagtatcttcttttgccagagttttgcgaagacttcacaaagatggattgtattaatctgcagaaattccaagttaaactcaaaatatctttttcacattaaattatataatcaaattgcatttttctattgtgctcttctaaaattgcttatttacctcttttataaaatatttaaggtgtttttctgaatttccttgttttgattattattgcccttttagatacttgtgcagcatgtttttgatttatgtggctagattagttatgtggccttatataaacctgcaagtatttatgaacactaatactaagtgttctgtgagatatatagaaaaggtctaagatacaatctctggcttgaaaaatcttttgatgttgtcgagggagacttggtggtgcacatgaaccaaaagtccgattctttaacatagtatgtaactaggggctaattacgtaggcaaaactaagactttttgtatagcagagagtaggtagatcagagagtttatagagttcatggaaaacttgggtttttccatatgaataggatttggcgaaggagaaacgagaaggaaggatgatcgtggtattattattgaaaggcaagtcactgccaacctcaaccagaggatatgtgacaggagaactgtagaaaattgagtttaaaaaggtgtgtggggagcagtgtatgaaagatcttgaaaaccatgtagaggagcttggaggaaatgcagtagacatgggaagccacggaaggttttgaatcagagacatgaagtagaactctgtgaagagtgtgagtagaaggactggggaggacagtgccaaggatcaggcagatcagaaaggaggctgcagcagtgagataggtgtgtgggcatgaagacatgtgctggggtagttagtgatggcaggagggcattgagagagggttgagggcaagaggctatgtggaagaaaaatcagcaagcctggatcatcgcctggacagagaagggcaagaaaagcagtgagacaaatcacactgacccctcagcaccaatgtgaacacaggaaaggaggggaagctgggtaaagagaaagctgcttttgcaggggagtctttactttcagtttaggaaagagttttcctgggttggaaatacatcaaaatacacaaatggaaatcaarctttcataaaaattgaagctaagagctaggatgaaaacgacaagacttatttagcttccactcaataacctagacatagctgaaactctgaggataagatatcatctcagaatattgtcatggccttagagaacttttatttataatacatatatttgttatttttcttagaaaattctgcgtcaggaatacacacaaaacacgattagtggggctgtagtattaaccttccctgcaaaattccttatcattmcacatttgaaagatttttaagtctttaatatttaaatatgtattttaggatgcaacaacaaaatccttatttacctaagaaagaatcataccagaatccccatgtagaaattaggtgtttctaaatccataattatatgagcatagaawttatttactgtcttatatatacataaatagagtatttggcaattagttcataacacagatttaggtttatttaagagagtcaatgtagagagtatcataattataatgcattttacacataaaaataacatgagataatcattttttacctgtattagctatgctatagataatggccccttagttgtatgttccatggctgccgtgaatgatcccccatattcagacactccttagaaatgagcttttgaataaaggttagtaaagtacctctcattcagaccattggaatgaaatataccacatcattgaccagacgtgtacttaaatgaaatatatttgtttgtaaagcagcaaacaaaaaacctctcagcgtgtgccattttccacttcagtttgtggcaaaggggaccatgttgaaataatttgaggcctggtacacactggtcagtcttggtaatgcagaagggagggacccagtgcattattacatttcacgtgttgtttttcaggagatggctgcaatcagtcacttcgcatatggtttgaaaaaggcttgtctctctggcaagcaaactgttatttaagtacacaatccactctactactgaaacagttttgccaaacttatccaagtattctcacatgcttaaagatggtataaatatcatttattgctagccgttttcttcagactatatggaatgtcttcctgctgcctgatctaagtgtcccagtttacattatggtctttactgcctctgtttgatggagtgatcagtaaaaatttaatgacactataaaataataaaaatgtcattaatttaccacggatcttggatgcagtggttgtaaagttacattaataaacagaatattttttacaacaaaaagcattgttacgtgggaacgtataaataacacacataaatttaagagcaattttactgttagcacacacattattatggaatagccaataagtgtataaaacatagtatataaaattttattaaaatatactgtgcacatcaaaaattcagcttttatctaagtgcaaagaaaagccattattgtgtgcttactgtttcattgctgttctttccccagatcacaattttacatttgatgccagtaagaggaagttgatttttttcctagatgaaaacaaacctctgttcttttagttaccccaaattcattctctctctccacccatgcaaagacaaaattgatcaatcttgccatggtagggagggaaaagttgctaatttaatgcaaagttaaaaataatgcccgaagagttgaatggtttgttcagtgactctggaaattagggataataatacagcagtctatctgtcatcagtgaggctgccccgtcattgactctgataatacgtgaagatgatggatgctaccgtcttgtggcttgtaacatttaacattcatcagctctcactaaagggggctttatcatttaaatatctttatttaatatgcaacatctacctcatacatcataatttcaaagcacttagagagccaacagtcctacaacacagcagagctgactttaatttttttcaataacttttatgttgcctgcatgtttgtgactgacaatgcataagtaagtgtctgatcacattgctgcatgtaaaatccactgtcaacatgaagatggggcagttttcctggaaggggtgggattaaattagcattgaggtattttgcttatatctccaacatatcttacttgggaggtatgtatatggtgagagctagttcaagtgtgtggaaatttggacttaagaacttgccacccacagtctatatttgttccatataggggcatgctcatggatgcttaatgacagaagtttaagcttgttggaaccaaagtatctttatacttctctctgtgcccatgtccacatcctgtatttactaggctcatgttcaacctcactggtaaaatctttgcttagctcagctgcccagacgtaacttgtagacatcaggccctcttatcttatggttatgtggctggcaaataaatattctgagctattctttgaagaaaagaacgaaatcttctgggagactaggtggaaatttatatgaaatggcatggctttgcagggtccttctttaatctcaaacacaagtgcttaatattaccaaatctaaaatgcaacccactgcccaaaacaatttctatcattgatttattttcttcctatttaacaagtgtttcatgggatattcttccttgacttctactctgtcaaaatattgatattttaaagggaaagtatctctgcagaagatttttttttcaatgaagttagaaaaatgtatgacttcaaagacactgtgaatgtgttgttgaatgttctgaatgttttttgttatgattaaaaacaagctgatactactgaattgtgagtgcacttcattttttataaaagaaaagatattatcatcatgtaagctttgttgtcttaggattttacaaaccatggcatgtaattttccctcttctccttccttgtcaaaatattgatattctttcaggaactttattttattttattttattttactgagaatattttccagtaaaatcaaagagaatgagtgactagaaagatacttgaaatatgcatattgatagatagcacggtctgttgattttcagagaaagttgtttttcctcctatgaaaatacagttaaaggttgttcttccaagaagattgcaggtgtcacatcaaaactccttttgcatttaacatagggaaagcattcacatgcaaatatttgaaatgcgaaacaatgtgataaaacaaaggttgaatattttgctttccctggtactactcatctccactttaattctttttctttacatcatgacaaccaaagtgctactcaaaaatagaaattggctgattaaaagcagctgtcctttccctgactgcgtctgaagctcccacaaggcttatagttgctttttgttgtgtcctgcatctgggttaatttgttcttgtgcaccagtattttcacataggaagatattagggaaccatacttaacttggtttttattttcattctgttttttatgagagtcatatttcagaggtttccctacatactgctatttaaactagtgagtattacccagttagggaaactcgtgattgtaatttttgttgcaaatctttcatagaaatggtgtagattaaagcaaggtttatgctgtgttttcttccaacacagatttcaacatattccatgacgaaggggaactggaagacttcctgcacaatttgactgatgggaattaattatagaaatataatgatattcaaaaataatcatattagaaagcacaaatgtagtcaggctgtacaaatgaggcagagactctatcaagtaattgtatgtttgctctttaagaatatttccaagtttctaaacatcttacagaagagaacactcagagtgtttccatctaatgccgaacatgctcagtacagaactaggtcattgaacaatagactgaacagcaatcagcactctactgctgcataatgcattaagtataacatgcagaaaccattcccggagctggaagctgctatttcatgtctgtaaattcaagctgacatgacatttaatattgtttcatagtaatgaacaacaaggtttcattcattcataagcacaacacaaagccaagtttgagtcaggagagtagtgaggagacgagagggggacatgagctgtttttctgcagacaagaacaccatattaatgatggtcaatgagcccctctgctactgatccagagagctgcagagggagtgttcactgtggtgcttcagactcctactcctagaagaactggtgaacaagtaaaacatctctgggtttccctcctaaagcagcaggggtatttaactttcctggctccatggctggctaggagtgatgtcctccttttcagttcccagaaaatcacagttgaaattctgagacaaaatagtagtatcaatcatcttctggttggcctggtttgaaatatttgtttttgaaatcctcgtgcataaaattctgatttgtatttccccaggaataccaatgcaaactatgatctctaaatgagaaaattcctctcccattaaattgagccgtgtattttaataagaactgctctttcaggtttttgcattgttggctcaaccctctctattgcgttgtttttagattactggagcaaatccgacagagagaagatatgcatagaagctctggcaggttccctgtcacagctttcctttccctacaggtactatggtctagatgctgtcagtgctgtccatgtcacaaacagctttcaacggaatcttcctgaaagattttcagagtccacattggtcagaaatgatatttttgaattcaccttttggccattaagcaagatagaaactggaaggaaatggtggctgttttggaaactagaataagcctctgattatttgttcctctaggaaagaacgcgctttgagaatttggggccccagttaacgggaaagtcaaatgaagatggaaaactgggcccaggtgtcatcgaccttactcggccagaagatgcagagggtgagtggcttttctctagttcttttctgctgctccatgtgtttccaaatgtgtgtctgagctagatataggatctttatagtttttcataggagtcatcactagatttcttaggcaaagcaaaggaaatgtcactcttcaactacgtatgtatgtaagttatgttgtgcattatagtagaagactttaagaagcagttagatcttacattaccgaatacttagcaatccaagtacttcaagttaccatcaaagttttaaaataaaaggatcctctacatttcaatgaacagcagaattctgtgtttcatccatctcactgcatttgtatttaaaaagggaaaacttagaaaggaggacttttaaatattattttatctttcattgacaagtaataattgtatatatttgtggggcataaagtgattttgatacatgtatacattgtggaatgatcaaatcagaatatttagcatatccaaatcaagtgattcccaggtacaatcaaaccattttggggattaaatgatagtttgcagcagttttagcataaacttaataattgtttggggaaggcccagcctgtgcctatgcactaaccatcactaacgtctttcagaagtctgggtggaaagaccagccttcctctcagaatgtttacccgcaccaatatcaatgcctgttcgcttcttttccctttttgtttgtttgttttaaatgcacaagcagcacatcagcagaaattgctccccagagtctgggtacaatttatgggttaggtcagcacttcagtagtaatgttgcctggttatttactgtgtcatcacagagtagagactggttttcccattagctgttcctttggcagaatctgtcccaccagtcagggaagattaatttgttctcttcggagtaacatgatacttcacccatctcaggtcccagctaaagtccttctttagcttaaggggaagaatctcactagtatccctttaactggcagggtttcttccaggaccctaaaatccctcgaaaacacatgaagacacttcatagcagcatctaaactgggcatggcttttagtgagagcctggggccatcccaggcagcccagaaatccctggaatgaggactcagagatgaatagtattagacattaggaagcccttcagaaatttttcagaatgctaatttttcatactagtaggaaagactaatgtttgatgatagtttgggagaccaggtgttaaaataaattctgattaggatgtatatgtgtctatgggagtaaagagggagggagggaggggaagagaagagaaaggaaggaaaggaacgaagaagagggaggatagataggaagggaggcataaagattactcaaaaccagaaatatgcttgctgtcttccttgaagaatgtgtatcaacagcccattattttcataggcacttaaaagtgcaggttttccaccgataagggttgaggttcctctgcctagggagccaggaagtccaaatgatgttacttgcacagttaaccatccgagtgcaacacagagattgtggctggcctaaaagcctgtgtggaagtgtttcaggtctggcccatctcaattttattgggagattgtactgcagagtacctaaattgttgaccatatgtaattaaataaatatttttcattactttggagtattcagtctgtttatttgacaacagactggtagttacagagctctgtcaccttacccgcgctgtcaaagacttttctaatttgtcattcacactttttcatttgcttccttaactgcatatttggtgtaaatatagtcagttatctctcagtaatgtcattacctagttagtgatatcatgtgcttggtaagttaaaaatcatggtcagagttattaactatataagaggaaaaagttaaaaatttaactctagagaaacatactgcatataaatatttttggatattctattcaatgcctagattgtctagattgaaaccaatttccctggctgttttgtttttagaaaactttttttatcaagtgtttatatactagaggatgtcttacgccttttacccacattttctcatttaatccttatacacattgtgaagaaggtattactttttccattttacaggtgagaaaactgaggctgagaataattaaattactcgctatgagccacatattaagggtagagctgagattctccccagcagcctgccatactgcccccactgtttatgcagaaacacgtggtcccttcatttttctgaacaaactccttgtgaccttcctcagtacagcccatttcctctgccctaaatatagcaagtcatgccatacaccagctctcatgttactctgtcacacatagcagcagtgcctgatgagtatcatagtagaagggctgtagtggcccaggagcttaaggagcatgtgaaaacctccctttagaagcttgcccagaagttgccattgagacctcatgtgcttttgggggttcacgaatggagtcaagttacctgttctaataccgaccgaagtgcagtgcttctgtgaggactgctagcatgggtagcagccttctgctgacttcaggatatatcctggcatctgttcaaggctgagctgattgcaaagtctgctggagttacacttcatattaaagtcagagtagataacaggtacatatgatactttctctacttcgttccttcatatttcccttaacagtaagattaagaagaaactaaagtatcagaataactaaaaaaattatttgctccttcacttagtctttggtctaaaaaaacaaccagccaacatttcttgagtgcctaccatgtgccagcccctaaactagacttaaaacaaacgatgggcagcaaagcagagatgtccttgacctctttaaacatatggtctagtgaggaaagacagaagattaaaagggaaatatgtacatacataattatcatggagaaaagtgctaagaagatcaggacttctttgtgctgtatagaggatttggagtgagagctccttagccgggctgagttgataagtaagttctgtgcctctggcccaggatgtcttctccctcagtccatacaggtttcctctggctttggaacagcaattttaaggggctatgccctccccccatgtctacccatcctcctatggggcttctgaagtgactaaagtaagccagcccagaaaatgaggccctgcttccaccaggcttcccagaaaaatgtctgccagccatgaaaatgacaatatcacttagtaagcaacttgtagacatgcttcatagccctgagcctggaggcagtgaggaaaaggtcaccaaaagaggcagctgtggatgtgtattaaccactcatcaaaatcatatgacaaaaccataggcaaggaaaacagaaattaaaaatataaaaggcaaatgccttcaaaattttatttttaaagtccagctgttatttggcttgaatgtgacaagacagcatttcttgttcaccatgatatttataaaactacaaattcattggtgccggggacttaggaaacatgtttaaggttttgttatactttgaagcagttgaagtcttaacatgtattgagtatacataatttgttagctcctatgtaggacatgtaaggaagagagggcttgattagttgagtctgtcaccatataattaagaatagtgaacagctgttgaactttttatggacttttcgtatggcatttccccttttcttattctgcttaggcaagagtgcaattcttattccaactctcctaatttcaaggttgcctacagactagacagagttctagcctgyttaatgggagatttgagttgaagttcctttgctaaatgactaaaaacaagaacctctgggcttaagtttctttatcttttaaaaaaggtatgttggatttgacttcatctaaggtcctttccaagtctgcgattattattagaatcttgataaaacactgagtgaatttcttatcagaaagatgatctatctatcataggttccatttagggtttttttttagagaagtaaaagaggagagtaatggcttagaggttgtatttgtgccacttgctgaattgagttttcatgttccttgagcttttgtttttattaatgagaagatctctccagtagtatttcccaattacctttcacagatgggctccctcctctttctctctgctctcctttcccccagcaacaatagttgagacttggctttttaaatatattctttccatcctgtttcttttttctcttatacctggggtttctaaaggggtacttttcttttgtttctgttttgctgcatggtttgagtaagaaaacattcttctaacacctttaaaacaattttcacatcaattactctgtcccagcctttttgggaggttgtacctcattttgatttggggcatagtgaaagataagcctagcatttatggatgagctctgaaagggattatatttggccagactgttggaccctggatcagaactggaatgatgtgctgtcctccatgcattaaaactttgcattgattcaaatggaaatagatatgtgtaccaagaataccctcttttgggactattgctctcacatttcttcagaagcattttatagatttatactgaatttgtgaactggaacacagccaagatgaccttacccttctgaagctttatttgtgtgtgtgtgtgtgtgtgtgtgtgtgtgtgtgtgtgtgtgtgtgtgtagctccaactgcttctaagttttatatctcaggatattttttttattttcggcttaagctctttgtttaagacaaatagcagagattgtaatagttcttcttttctttaaaacacaccgcttaatatgaatgccctctcttaaaaatcctgctcattctttgatccatatacttggaaattgttgaagctttcctcattcccctaccctccctagatccttattcctggtagaaaagattgactctatgatacacgactcattcaaggcagcagaggcaaactgtagcctaatctggggtgggatttaaatgctataactgcatatactttggaatgtaaagatcattagttcaagcctaccagaatatagtgcttcacattgcaactcttggattctcagatttgaaataaaggagagaggtcatcaaatctgtaattcagtccaagaaatcacttctcatatccctgacaagtagtcgttttacatctgttcaaatgcctctgagagtctgaagacagaatactggccacttcttgagaggctcgtcctaattcaattagctgtttgttaacaacttataactaaaatttgcctcactttcttgtaacttctactcattggttctagtctgacttctagaccctaccaataaaacttatcatttcttgatttgacaccccttcagatatttgcttaagggctagaagacttaaattctggttgttccatccttgacaagtcattttcttcccctaaattttctcatctgtcaatgaggaagttggtctagatggtttctagttgacagtttttaaaactttattattttactgctatataattgaaaccattcaccttcaaggcaactagagtataataagtatcaattagggatgatgcaataatcaaaataaatacaattattgtgtaattatatcagagatgacatgcctttgcccaagaaggtatccaactactagatactaggaataaaagatgagaaattatacacgtaaaaagataagactcaggtaaatcagagggaacattaactagagctatgctgtgggcatatgggtctggctttccatagctacccaaaatggygtccaggcatttcagagaaatgaataggcaatagcatctctgtggaaccagcagactggtgactgaggccaggatgggtagtgagggaggcccaagacctggtgaaaaggagtaacagccacacaggctgggatataagcagagtcsacaaagccctgggctctggactaactctgttgtatgagtatcacaaaamtgtattttactgtggatataaacagttttagaggatcctgtgcaccagtttatatcagcactatatataaagtgcagctctcttaaacaagcaaataaacttctcttaaagaaatatatttgctgtgtcttaaaagctccgaaataacttttaatgttggtagaaaacaatttccattgaaccctccaagtgatgtatagtcctgatggggcaagatagtgaaatgtcaagattcttgtrtaactccatctcctaatactccataaaaggaactcaacctgctgcttattgttgcttaagatagaaagcccaatcaaagacccagcctctctttagtgaggaatctagccctactgkatagctggtttctcattgggctgccttttctaaagaagtgtcaatggcagtgtgaataattaccacaaaaaaagatctrcttttctgactgaatgttctttaccctggggaagaaataactgtctatgtcattactgaatcacatagaaatatagtctgccgtctgtatctgcaagttctgcatctgtagattcaatcaactgtagataaaaaatattcacacaaaaaatggctggttgtgtctgtactgaacatgtacagactttttccatgtgattatttcctaaacaatgcaatgtaacaattatttacatagtatttacattgtataaggtaacataagtaatctagagattatttcaggtatgtgggaggatatgcataggttatgtgcaaggactacaccattttatataagggacttgggcatctgaggattttggtatctgtagggggtcctggaactaatctctttcagatactgagtaatgactgtacttctccaacttgctacagcaactgagcaatgaaagattaatactatctaccatgaaaattaaacccaagacaaggatagctagcatatgttcccgatgggactgcaaaatcagcccttgcttcctcagcagtatgtatgtctgcttcacataaaccaacacattagattaaaccctgactgatagagttctgtccgacatatttggactgactgtagcttttgagattgtggaccttgcccagattcttctctcctggcagtaagagccacttgactttctacctgcaagctgtggaattcagcctaaccttaaggtaatgggatttaatgagcatcaagctagttatgaatgtgctttaaattctctctgtttaaggtcaggattggaattgagaccaaactttgatcaattggccgtttccttttcttcatgttctgataactgtgtttctaacttgttccaaagagtcagtacccacccagtcctcccccagtttctgttactgacttcctatcttttcttaaccaaggtgttcttatacagtcatgcaccacttaatgacatttaagtcaatgatggcccacatatatgatggtggtcctataagagtacaataccatattttttctgtaccctgtctatgtttaaacaaattacacaaatacttatcattgtgttgccattgcctacagtattcagtacagtaacatgctgtatgtgtttgtagtctaggagcaatggactataccatatagcctaggtgtacagtagactataccatctaggtttggtaagtacattctatgatgtttgtacaatgacaaaattgccaaargattcatttctcagaaggtatccccatcattaagcaatgcatgactgttttttaatatctccttctagattcctcttcttgtttggttctgcttgtctatcactgcctgcactcactatctgctgtctattttcagcctctttagaggtgggtctctgtagactgaatctccggtgctaggaaccaggactttctaaccaggatctgtccctactcatggccttccaatcttcagttttacccatatgttcaaccaagttataatttactgattatctcataacaccatactgttatgggcatggagggaaaggttttttaaaaaatatagaccacattatattcttcaagagctagtaatgtagttgggattacaagcttagtatacataaaaaccaaagcagtttaaggcattaaatgttcaagtacatcgttaaagaaacagaaaagaactgctatttagaggaggaagctttgtggacagcaatggttctggaaaacctgatagaagtgtggctggagataagcctaggtttggataagcaaagagaagaggaaaagctttcatttgagggaataatctaagcagacacagacattaagcagatagaccttcataggaaagctccagaagggaagaatcgtctttttcatctttgtcttckccactaagcccaacacaaagccttgcacacacttgcaattaataaatatttgttgaattgagtatgctacagaaatagatgggtgccatattaaggagtgccttgattaccacgctgaggaatttggactttaccaccaaataaatatgcattaacctttaatcattcaagactgatttagactagagaggttaagaataatggaaatgcagtagttaggttgtttttggagatctgttagtcactttattcctctgctctctttaatattatttcagagaggatgttcaagtggatatctttccatgttataacatgagaaagcttagcaggtgttaggtgggttttcattcaaacgcatactagaaataattcctttcctcstctcctcctggatgcaagtaagtatgattttcactgtctactgtgactgatcgatgccttacagatcagtcttgtacttttgcctctcacttaggagtgcgggtttttttttaattgtttttgttcaatggatatttacacctgagacatgatgatgccaaagttaggtcatagtaccagaggggaaaagttatgtaagaatgcatcrtcatttgctgtatactataaactgctacatttgggaataggctatggcatgtaactctgaacaaaaatgtaatatcccaagtctcagacctggaaaaaagcatttcataagaaatatgttcaatcattttaaatttatattagaaattcaaattgaagcttactggtatcaatgtattttttactttggtggtagagaaattgctcatggtgcttcaatataagctgactcttctgtgggaaggttgatcctacacagggacaaaataaacaggataatagctgctccatgctggagagctacagacctgttagtggggaagaagaaaaacaattgtcaaatgtccctgaaacttcattgccctccatttattataatttcatagtcaataattcaaatccttcataattccaatgagtcttttataaaaaagcctatctgtaggttcacaagataatggtctcttcttttcttctggctctgtatgagcagtatggtctgatttctgttcccatatatgggaactgcggagatgtgagatggtctttctcggttgagccttatgcctagtcattrtattttcgtctatatcgtagagaaccttttgaaatatatttttagcatttgggaagaagagaggctccattaaggagtaaattgcattcttccgttaacttatgggtttatttagtaactacatgaagaatagaatgtaaaatatagcaaacatcacccaggtatgaggaaagtctataaagggaacacatatgagttaagcacctcctatgttcttggtactggaataagcattctactacttctgttgccattattactgctacctatttctaaaatgaactactgcttagtgagtaggtattgggttccagtcactgtgctaggaaatttacatgtatgcccatttatttctcacaaagatgctgcaaggtagaaattattgctctcttttatagaaaaatgaagctacagtttagagaaagaaaacaatttatccaaggctacttagctaggaaagatcagatcaacaattcaaacctagatctgtctatatggcatctgagccatactgcctcctgtttttctccaagatgagctgactaaattgkttgcctttgttggattagctttttcctatagttttcattaaaaagcagaaaattttaattagaaatggaaactgtgaaagtgtttttaatcctttaaaccacagaaatattaggcasttttcaaatactttcaccagttctcggggtgaagaagtattggtgggcccatcagattggattgtctctaaaatccttgagtgatctcctttcagtactgttcattcctcaaccctaaccttaaaaaaaaattagtttctgctactcccataatatgtattttccattctaatgaaatacagattccccagacaaatgaaatgaagagaggccagttaaattagtcatgttaggagttttaaaagctaagtttggatgccattgaaacaattcagctgaccattgaagaaattcattctgatggaaagtgtgaaatttggggatagttacatttgagtgcccattgtgatttttgccatttattaaccgtgagacttggacaatttaatctctctaaacctgaaagtttcctcatttggaatgaggagtatggattaggtaatctttaacatccatctcctgttagagttctctaattcaatgagcgtgttttatctattttataatgaatctgctatttaaggaaagtcccattgtrtgcttacttgaatacagtacatatatatgtatatatatacacacatatatatgtgtgtgtgtatatatatatgtattatatatatatttacacacaccctacatcattagaatagttttcagatttaatatttccaaaaatctcagacatgccttaccatccttccaaggtttttctagaagtagggaggctggcatctcagaactgcacagtatggctagtcaatcaaagaagtaagattggaaccaataatctctgagtcccacaccgcaactatgggtacattttccacatcaaaattattattgttttatagatgtttcaagaaatgacacttaacagaatataagaaattaaatttctacaagatctgatttcagaaattcccaggttctaatagaacatgtgggcattagagactcactctaaaattctcactgttgaagatgtccactgtactgtattagtaagcatttgagtatttaccttatgccatcctggctactagaccctggggataaggataagcagctaaggataagacacaatgcagtcaccactgttttggggtacatagtctagaaaagaaagtaagtacataaaactggtaatttggataaaatatggcaaatgttaagatggaggtacgcatagggtgccacctgtcagagcctaagctacttattctaacctggcaaccaggtaagactttcatgggataaataatacctgagacgagtcttcaataatgagtgattgcaagatggccaggtaatttcaggaaaggagaaaactcagatccctagtatgtacacacacaacacagtgtgtggagaactggaaatagttcagtgttatgacacaaaaaatgttccaagcagagtagccagagctggtactggagccatagttggagggccaggtcacggaaagccatctgtactgtactaaggagtgtgaacttcatcttgtgggcatgagggagccattgaagtgttttaaatatagcagtggcctagtctgaattgcatttgtgacagatcattctggctgaaattaagaggaggtatttaagtggaggttaaaggatttaaaactgggtgtaagaatatcagccagaaggctagtttttataatagtccagcaaagatagtgaaggctaaggcaatcgataaagattgaaatgagaggatggattcagtagtatctgtgttaactaactcctgagacttgcttcatcttgctttgcacttcttaatttcatgtagagtctatgacaggaggtagagctggttaaagccaaaagctgctgaataacacgaattattcagtctaccagctttttaccagcctcattattctccaagggcatcttcttgaacctgagcccagttgtcctgaaaacttaggaagccagaacttgttattgccttatttcaacctcagtggtctctggttcaaacttaaatgatgcctttttacctgggctcaacagcttgtaggccctccttctatgtataaatacagcatatagataataagtgggatgtttgatgctctatgctcccttcaggtcattaaaataaagaatataagttatcccagctgccctgggattctgtagttgaaataagataaaggactctgtttagctatctgtgtaaagtaaatataacttgagaattttgaaaaaagtaaacacaggcatcaaaactgaaagcaagagactcttgaaaatacagactggtatatcactggttagaatttccttcattttgcaaagccacgagccacatgcatcagctcaccacaaagtcattaagcctttttaagctcagatgaaaaacattaacaaataccacaaaaggctttagtatagcccctttgttcattcacatatggcactttataactcctgcgccactccggtcgtgtgtttgtttaagctgcctccatcaggctggtcctgaaagaacaaaagacatcttgagcaatcctaagcaggaaatgggctaatctaaacatagtttgtgacactttaagtagaatagaaaggggagggattgattagtcattaatgtccaattggctccatatggatgttgcaataataaagccctttttcagagcagtagcagagttattgaattagaggtttatgtttcctcagagctgaccttagggaattccctttggttcctcttgttgatcttttaaagagaatggagtttctaatagaaaaaaaatagaagtcttatccacaataacacttgctcataatcctgtaaccaaggaatgcattaatttagcattgttttcatcccagctataattttagtccttagtgctttctcgacatgcccttgcatctttggtggggcagtatttcagagaacaattagacagtggcatgaacttcataactggtcatgggctcttctaatgtgcttagctgggcagggaagtggcatccttaaagtgggaaaataatgttccagccaagaaatggtgggctttgaaattcagagttatttcagattgccgaatagtgattggggtagctttggtgaaggggtgatgtactaggctgaaagtcagaagatctacgttctagaactggctctgcttcatattaccagcaactggttaatcagaggaaggtgctatcatgtctctgagtcttgctttcctcatccataaagtgggtgaaaagatatctgccttcctacacattttaaaagattgtaatgaggatgaagataatgtaatyagtgaaagcactttgtaaatattattttatgcaaagttacttagcacagctggtgttcctatcctagaaactgacctctggcctagtctatcaaaaaggtaaattgctctttaaagaaatactttggtactctgattaatgaaatgtttgtttccagccgagagcagtggctcacgtctgtaatcccagcattttgggaggccaaggcaggcagatcatttgaggccaggagttcaagaccagcctagccaacatggtgaaaccctgtctctactaaaaataaaaataaaaaaaaattagctgggtacagtggctcacatctgtaattccagttactcgggaggctgaggcaggagaatcgcttgaatccaggaggcagaggttgcagtaagccaggatcaccccactgcactccagcctgggtgacagagtgagactctgtctcaaaaataaataaataaaataaaataaataaaaataaaaagtttgtttccaaagtgcccaatggaattttttatgtgtacattatatataactaggcctttctattcatgtctctgtctctcacacacacacacgcgcacgcgcgcacacacacacacactgtcatcctctctctctccctagtttatttagtgaatttcttgatgtagatagcttcaacagttgaagtaaatagggatttgtttttagtagggctaaggaaccttaagatgaaaacaaagatattaaactttacttatggttttcctcaacattcagcaaatgaagaattaacactttaattaaagtaccacaggtaattcaccttttgttcctgtaccatcggctcttatatattcaacaatcactatctcagaagaattgtgtatccatattttgcatttgcctaccttaagtcatttcacctgtcactagatcactctttgctaatacatctaggtaatttttataaaagatacagagaacaaagcatactctacatctctggcatttcttcttctcagaagatgaacacatcacttcctcacttccttaatgattaaggctcttgctccgccatggaatgtattttgcctgccaaacaaaccactaggatagccaaatcctttttctttttttttgcaaraagaaatcaaatttgaaatccaagcagccttcctgtaatgaaagtaagttcacattctggcagaacaggaatgagaagttagcagtaggtttccataatcatagacagacatctatcagccattacttcaacacaatgaattggacctctgttgtattaagataaatttggtaggataaatatggtgaaaaatcaaatctgtgtagtattagtactctcttttctaatttcaatccccttttaaaatttcacctkctacatttttgtttctaatgcattcggtatcatttttctctaataacccaagtaagggactatcaaatgtattgtgtgactcttcagaatctcacaggagaaaatcaactattctattaataaaatgaagtagtctgaaatactgtgattgtcaacagttccatcaagcaacccaatagtgatacttatgtctctttctcttcataagcaatcaattatagttttttgctcttcttaataattcattttagtaaatgagattatctttgagttcacaatggcctgaatatgtcacctacttttcaggtccacagaaaaaagaacctttcaaaaaaaagagcattttatttgttggatggttggttttctgctttattttgtggggtttttgtttttggtgtcatttttgccttttttaaactaagagttacaatagttttattttgagtagtatcccattgtatggatatatcacaatttgttcattctccagttattttccttttttctattattgataaaactgctatcatattcttatataagtctgtttttgacagaagctttaatttgtttgctgggtcatamgtaaatatgcattttaattagaagaaattgccagaaaatggttatgctgttttatactttcactaccagtatattagagttacagtatattagagttgctccttatccttgccaacatttagcacttaagccattccagtgaaatgcatctcattgtggtttcaatttgcattttcctgatgattaataatagggaataccttttcatctgcttattggccataactatatccttttttgtaaaatgttcatttaagtctattgtccattttaaaattagatttttttggtcattctttatatatcctagatgcaagttcttatcagatatgtgtgttccaaatattttttccagtatgtgctttgacattttattttcttaacaatgacttttgataagcagagttttaatttttataaagttcagtttaacatttttcttgtatatttagtaatttatatgttgtatctaagagtcattttactttaaastcactaaaatattgtcttaygtatatttagaggagtgttatagttttttctttcttgattkaagtcatgattcatctctaattgttgtatataatgtgtgatacaagatgcaggatttttttccaatgtgtctatcaacttgttctggcggtatttgttgaaaaaactatcgttttccactttaacagccttagttttcattaaggtagtttgaatcctctaattttcttcaagtttgttttagtttgtcctactgctttatttttcatataaattttaaagtcagtttgtcaccttatatgaaaaaactttgaggaatttttattggaatttggttgaatctgtaggtaaatttgggaacaatcacattgtaacaatattgagtcttctgattcaggaaatggtatattcctccatttatttatttwtttattttttttttttttttgagacggagtctcgctctgtcgcccaggctggagtgcagtggcgggatctcggctcactgcaagctccgcctcccgggttcacgccattctcctgcctcagcctcccgagtagctgggactacaggcgcccgccactacgcccggctaattttttgtatttttagtagaggcggggtttcaccgttttagccgggatggtctcgatctcctgacctcgtgatccgcccgcctcggcctcccaaagtgctgggattacaggcgtgagccaccgcgcccggcctattcctccatttatttaggtctttaagttacaaatgttgttttgtttttagtgtagatgtgttgaatacttttttcagttaaatttattcccaagtattttattatctgatgctattataaatatatatttgaatattattttttaattgtttgttgctagtataaagaaatatgattgattttggtattttttattgttcattgcaatactgttaattcacttattagttctagtattttgtaaatcccttaggattttttatgtaaacaattatatatgaacagatgacattatttattcctttataatttgtatgctttttattttttattttattttattttatttattttattttatttttttgagatggagtcttgctctattgcccaggctggagtgcagtggcatgatctcagctcactgcagcctctgcctcccgggttcaagacattctcctgcctcagcctcctgagtagctgggattacaggcacacgccaccatgcctggctaatttttgtatttttagtagagcagggtttcaccatattggtcaggctggtcttgaactcctgacctcgtgatccgcccacctcagcctcccgaaatataaagtgtgagctttttagttttttaattgttgattaacaatggtgagagtggacatcttcgccttgttcttcatttttagagaaagcattcggtagttcactattaagtatgatgttacctgtaggtttttcttaaatgccctttatcagactgggaaagtttccttttaatactaatttcctgagcatttctaacatgattgagtattgaatgttgttaaaaccattttctgaatctattgtgattatcatgtgttttcattccctttgttctgttaatgtaatgagctacattgtctgattttcaaatgttaaaccaattttacattcctgagataagttctacttggtcatgatgtattatctattttttacatttggctggattcaatttgttaacattttattttaaaattttgcacttacactcaaacctctgtcaaggtatgctgcctcataaacttaattaagaagtgttccttcttcctctactttcatacctttacgcaatattattcttattttccttaaatgtttgaaagaatttaccagtgaaaccattcggggcttcaattttctttgtggataagttcttcgttataaattcaattgatttattagctatcagtgtattcagattttytatttattcttgagtgaattttggtagtttgtgtctttcaacaaatatgttcattttatctaagttgtcaaatttattgaaattaagttatttataatattccctttttatctttgtaatatgggtagtatctacagtgaaatctcctctttcagtccaaatactggcatttttgtcttctctctttgtctgttgacccatcttacttaggatttattaattttattgtacttttcaaatttctaaccttggctttgtaagttgtctttattatatctgttttctgtttcattgattcttactcttcatccattcagagaaatcactaacttttaattagataatttgatttatttctgtttaatataattattaaatctgttgggcttaggtcttacacttcagtatttttttcactacttgtatttgttccctcagttttttgtcttctatttctcctctctgctttcctttgtgttaattgaatccctttttaagtcttttgtttgaagtactctggtagatttttagctatacttctttgtattttttacttttgtttgtttgttttttgttttgagtcaaggtcttgttccatcacccaggctggagtgcagtggcccatcctcaacctcctgggctcaagcaatcctcccacctcagcctcctgagtagctggaactacaggtgcatgccgccacacctagctaattttttaaccttttgtagagacagagtctcagtatgttgcccaggctggtcttgaactcctgacctcaagagatcctcccacctctgcctcccaaagtgctgaaattgcaggcataagctaccttgcctggcctctttgtatttttttaaattggtttttctaaggattcactatgaaaccttaattgagtatccttacagttaaaattttaccacttcacgtaaaatattacgacctttaacaatctaattctatttataccctcatcttttgtggtaatatgctattgttgttccatatttcacctttttatatgttataagtcccacaatacgatgttatattttgtattaaatagttccttgtcttttaaaaacattagacaattagctgtttattagtgaaatccagagaagaaaaaatggtcacaaatcatttttgatattcttcctttctttctgtatatctggtttttattgagtgttatttcttttcctcttgaataatttccttgaatatctcttttggtgtttgtctgctggtaactcatgcttttagcttttaatcatttgagagtatatttcatattcatttttgaagcatatgttcactggataaaactctgaatttatttccttttatagcattataaagatgttgcatagtctactagtcttcattgtttctagtgaataatcagcccttatttgtaattttgtttccccgtaagtaatatgtcccttttctctggaattttctctttgtctttggttttcagaagtttaactagtttctaggtgtggttttgttgtatttatttggcctgcatttccctgaatgtctcaaacctcttagttgatgtttctcaccaaattcaggtaattttcagccagtgtttttcttcctttatttttattttttgatctctgagtcacattttcctggttgtttgtacaactcatactttttaattatatattgtatgttgtggattatccattgtagatactctgtattctattatcttcctctgaaaatttttaactttgggggcaggaagcagttaaattacctgctgcacacgttgaacttgtggaaacttagtttttgcactgttagggagagtcttttttaattttgtttttagtcttagggcaaatccttagtcctggcatattgaatttattcctaaggagttgctcctctggagtttcagtggaaagcccaaggtgtttatgaattctttctaacttgataggattccaattcaaattctgtttctcttgcaaagggcatcagctgaaatctcttttcagattttccagatacacagctctgtttttcatgggttcatttgagtcttccaaatacatggcaagttcaggggtcagcagccacctgtaagttcaaactctgtcttctgacacattaagccaattaaactgactttctatttgcattctagccactccatgctatgaagaccagaaagcgtcttcatgggaaaaactatgaaaacagaatttcatttagtaaaatgcctttcattctaggatggaatccactccagtttctgtttaattttggtagctctcaggaatcttcaacatctatgggtttttttcatattttgttcagagtttatatttattatctattggaggacagggctgatatgagctattctgccattaccagaatttgattttataatagaaccttttgcgccaatattttgcatgtatcacattaattctatctgacaaaatgtaagttttaatgggcccttgaagaggtagtcactttatttttcctctattctattctttattatcaattcactggtaatcattgagactattcagtggtaatttctcatttagttttccattttgatctcttctagaacatattttttcatgttactcttctggttaaaaacctcaaaagacttcttagcttggcattcaaggtgcttagcaaatttggtccctatttacttttctaatttcatctcttagtactccccttttttttttttttacataaacccaagccatcgccagcttctttttattccctaaaatgtcctttgctttttttttttataaccctgtgcctttcctcacactgatttccaagcccaaaatagtttcacattcatacctgctggtaaattattacttctcctttaagatgctgctcaagcaccgcttcaactctgaagcctccctaatattcatctctgtccactccaattgtgttagtagcttattttccctgctctaatagtatttttaaattaccgctgttagcatcgtttgtaatttttaatttatgtgtcttctcccattggaccaaattccttaaaaacaaagtgcacatgttatttatctttgtataccccatcacaatgctgggtacatatgaaatgtgtcagaagtgtttattgaattaatacataaataaattattactaggcacattatagaattaactagaattcccctgaggaataactttatatgtgcaccaggcactcactcattcactctgatatcccttggaatttaaccacgaaggggcctctccaggattagttcaggaccattgccagaggctatgatggtgaaactggccttctttccaacccacctggaaaaactcaatttcgtcttctctttaaatcattcaaatcacagatttctaaggagatatttgccttggcaatttctattttctctctgcagattaactatctttaatctaaccgaaagtttgcctttacacaaactgagatgaaggatgaattaaccaatttgagccttctaggggaagttgtacagagcagcctctcctggcatacgggaccttgctttcccttgaagcctactgtggtgctgttgatctcttggcctttcagcaactgtcatttgggactgctgttgctggtaattaaagactcttaggtcagctggaaagccgtctccaggtacataactgtgggtctaggyttctaactgctttccatgaaaaatcatacgctgaactcacaaatgacccctctgctrttaaaaggagaagaagctgcctcatagaattatgagccattccaagttctggattctgatgcagactactggctatttaagaatgaaatacttggttttttgcacttaatgatgaatggagcagaatgaaatcatacaatatgctgatttttaaaattaattataacaaagtgaattttagacttcagatacacagattaatagtataccttttgaaaacaatttatagtatgctgtaaaatttttcttatctatttataagggttttccagatatataatttccatttttaaatttctgaatttatacacacacacataatcatatgtatttctactgcggcaacaattctttaaccattttgtttcagaagcaaagtttagggacactttctaaatgttcttttgactttgtggcctctaatactttcttaaaattctgaatctaagtttaattcaaacttagattgtaaattcaggtaatagwtaagttgtcagctttaaatgaaaaaaaaagtaatattgggagatgttttctatcagaatattgaagaaatatttgttgaaaacatctatctttctgcatagtactcatatggatgcttcagtgagttccatataagccttatatggcatagtcacttcgaaaagacagaaaagcagaaaccttcaatatgtattwgtggggcatttgtggtttatattactgtattttctgtacattacccaggtgttaattcagatattataaatctagggaaggatagactccctttctaggatgttagtggtggtggtgaaagcaaaggtgagaccatttttatatgcaaatttggtttgttgttgttgttttcattgactttctaattaaggagagtgacctcctgggcataatttgcatagtcataagatagtgttagagtactacatatttgggagataggacaggaagggggcaaaaataggaagagtggtagaaggaaaaacaggaaaacattttccaagttttgattttgcaaagggatctgggcattgcaatctgtgtggtgttaaacgtcgctgttgtagttgatcaggtatcagattcaatttaaaagtagtttcaaatgttggcctccctgggtaaatctcttcttcccaaatcttggttcatctgatacaacatttctagtttagcttaggatgtccccattcatttctagttcactccttctggaagacagaagaggtgaccagaaaaaagcaatgtgcacatgatctaaagcattttctattcttctccttcttaattcatgtttttgttctgtgcactgtgctcgaattttgcaacttctggaagcattacatgtgagtcccagagaattgctgtgaaatcaattccttgtccttcagctcctgaagataatatgtgatgtaggaggaaaggaaaaggtcagtgcagggtagaggtcagacttgagctctgttcctcagaaaaaggtagaaactggtaaagtagaagagagtaggaaggatatgtgaagactgtggtacagcatgtgtgggagagagattgggcatatgtatggcatatctgggagactctattggtatggagtagagaatctagaatgtttataccaaagccagcatctaaaaatccactatgatctctgtcagtctttgagacagtaaaacttcccatttacgatgaaatacatattttaaatgaagaaataaatggaagctgactatttggttttgctagaggtggagagaaagctacaacagtaaaagcaggctcaaatgttaatcacctgtggcatagcagttaacttagaataatattgaaatgtttttgcatctgacattctccacaaacctgtctccttttatgtgaatgcatgtcagtatataaattgctgaatccatgtcagttgtaaagtaatggcactgagggcatcataaattaccatggtgatcctcaggagaagacactgtcgtatctgaatgagtgtttcacttccagagtaatgtatgccttcatctggcccagcagtcagcatattgccctgtgttgatggatattgtcagctggaagctacactacatttcactgcgcaataaacatggctgtcaaacccatataaagtgaaatcaatttatcctgtatggtcagtgcattttaaatgaaattaatgtactgtgggtatcgtggcaaaaaggtatcatattagttatgcatcttgggatctaagacttttcatgtaaaggatcattctgtctagtaggcctaaaagaagggctgtttataaaatatgttatttttgtataatcttcagaaagtagcctttctgccctccttcctgtttagaaaaaaattcatgttagccaatcccacccttttatactgtcttttgtttgcagtaaatgataaccatatttgctaaataatagtgcactataatgttgtaatttattactggctttgacacaaacaaatgtctacttaaccaaggtatctaaaaatagagaggaagggccagagattgattgaatcatgttggtcctgtataataacttcactgagcagaaaggatttactttttccagaaaatagaaatgttggttttaatgtatattttgcttctaaacttctgggcgtagactttcctgttatgcggtagaagccttgtctgaggctatcagtctgaccactttacctttaattatagaagttctcagtctgtaggagatattcaggagttgccacatcacaaagtatacatcagtatatcgccctggtatagggtgcatgaaaacaagtaagaactatgttcattcattcatttatttattcawtcatgcattaatataacatattttactaattgaaatcctatgtgccaagtactttaytgaatcctaggaatacagcagtgaataagacccatcccttgccctatcttcagggagctttcaatctagtatgttactagagtcagctctttggaaattatatagcatcaggaatttaggcatagtttcatagatgttaaagaactacccttaaacaacagaaaaatagaacaggacgcttgaaataaatgcctcttagtctatgacttttgcatatgagttgaaaaccaaataatctttgcttaatgaatattttattatctattatgtgaaaaatcctgaggatacaagaataagtacagcataatcattaactttaggtatctcrtattcctgagaggagtggaaaggagggagatagtcacataaacaataattactatggggcatgtctcctgaaagcaagaggactgagtgcagcctggggagcatcactgcaagtgctgttcctttaccctgaattacccttcccatcagactttactccctctcccactcacttgttgattcctattcatccttgaagactcggtttagacatcacatctcctaggaagcactagctgaccattctatctggtgcttttttggtgccctgttaatgtcagtattgtagcacctctcacccactttgttataattgtctgtccttactctgaactgtgagctccttaaaagcaggagctgttttatttaccatggtctccttagcacctggcataaaacctaggttatagtaattgctcaataaatatttttcattgaattaattcattcaatcatgaaacatgattgaaggttgaatgggatttagcatgaaagagtaggagaagtgtcttctaggcagtgagaagagcacaggtcaagacaatattgtgaaaaacaattctatttttgggaaacatatagagtggttgtgatctggggcaaatgagtctaaaatgaccagtaagagcatgtttttgaagaaaggaattacagcaggaaagtttaccataaggtaatgtcattcattgctctgtgatcacctaccatttattgtagtaaatgtggtagggtgtataaaacacacacaaaattaattcttagtgtgtctttgagggctacatcagaagagcctgtagaactgtcatttgaacctgccttctacttccaagaagtcacttagaaaagaagaggaggacctggggaaaacagctgacccaggcggcaagctgtgtgacattatccacaaaataacgctttccactcatcttgttcttcctgccctgacattacaggaagtaaagcaatgaatggctctgcagctaaactacagcagtattattgttggccaacaggaggtgccactgtggctgaagcacgagtctacagggacgcccgcggccgtgccagcagcgagccacacattaagcgaccaatgaatgcattcatggtttgggcaaaggatgagaggagaaaaatccttcaggccttccccgacatgcataactccaacattagcaaaatcttaggtgagtgcagcagtgcagctaaagctgatcttctcccctgcaaatcccatgagtgccaccagggtgggaagcaaggggataactaggatcctaagggagattgtggcgggcgcaagttagacgaaggtcagccagctgccgcaggagccttcgtcatcacgtctgcctcccccaccccataatgtggcatgtaggtttgggagttattatatccaccaggtgccagggcaggactgtctgaacacttatttcagagacaaaactatttatagtatgtgttaatactgtgaatttagcaactcttgagaggtcactgctaaacaagaatcgtggagacaagctttatctccttttactgtgcagttctcttaaattcatatgttgctatgaagtactcatagaccctacagttttctgctttagtgttcttgggtttatatgtcccactgaaagaattcatcaaggactagaaacccaaaatggtatgaaattcatggagtgcaaaacagtgcctctgatgatcactttaaaacttgtaaaataaatctacaattattttaataagatatgactagttcaaatttcatagcagtgagctgaacacacgagctgcaggggagaggcccagtttgtggtaaattgccagagtgattctctatttctcaggattaaactcaagccttgttctattagtgtagagcttgcctagtgtggattgtacagcttggaattattgtgctcaacatgttaaacatattttattcaacatgcagcattacagtcaacatgtttcctctttaaaaaggaaaaacacagaaggcactgctctacttaaagctgtcacgatgtgacaaaatctcaaaggaagccatttaagaagctgaaaaacattagagacttaaactgtggttttaattttttaaatgttttgttcaaaagtaataaatatttaacctgagtaaatatcagtgatctggacatgcacagatacacatgttttgtcactgtataaataatttaacttgattctgaggcattttgaggcagtgacctctaagaaaaatttaaaacatacataagatcaaatagtggtgaaatgttaaatatgtttttcttttttttttgattttctaatttcaaaatggatactaaatgtcattacaattaagtgtggtttttatttttagagcttcagagttatgcatagggatgttattttgaatttaaatatctttcaaaccaaaatgttcctagtggacatacatttttttttttctagttaaatgacattctaaaaaaaaaaaaaatcagtgcttctctggccttacagttttatatctaacttgaagattttcatatttttctgcccttttagtagcaatatgagtaagccttcagatgggcacagagcctctctgtttccattttggcagctgtggggaatctatattatttgtgtgcattctgtgaaaaaattattaggaatatagtaagtatattcattaaaatgtaaagttttaagtgcaagcgtttcaagagcaccaagaattcttckttaattggggctttaagctgctggaaaccagcagaacacagagaagcctatctgcttaggccttctacacaacttttgaacaacaatcaggaaagagcagggatgcatgtgctattaaagcagactaggatattgctggctgcagagaatatttgtacaacttttccatttgtttatgtatgaaaaatctccactgaagaatcgctaacatccagtctgcacagctgttaccgctttattcaccagcgagacacaaaaatgcaatttgatacatgtaaaaaaacacatcccctcttcatcaagtgtttagataattctttataaacaatattagagaagtgaatacttatccttcttcctgtataaaccgtattaaaatttttgtacttttattggtacagctttgaatgagcgtttatagtacttgaaaatggtatatataattccaatggtatcttccggttctaaagctataacttcttaggtagagcttaggttttttaattacctaggccatggcagacttgtgcacagtagttttttatatatggaatgatttcaacatctgctgacatcttgtcaaaggatagtttcactaaagatacttggagtttgggagatgtttgaatttctaggacaaacaaagcttttcctgagaatcctgtcatgctcaaaagtatgcttaggaggtttagccttttatccctgttgagagggtaggcaggtggatggggaaagaccttggtgtaggcratgatctttaagcagcaaagatatattttaaaatactatagtagcatcagtcttaaactattgagataaataacacaagaaagtatcatacgcaaaattgttctttgtgttatagactaaaagtatagttgggacagccagtggtatgtgggaattggagccacccagcgcacagatgagtgaagtgatgggaaggtatatctagttgtgtttgcctagaatatrttgccttgaccacttgggtacttaaggctatttttatttctaggatctcgctggaaatcaatgtccaaccargagaagcaaccttattatgaagagcaggcccggctaagcaagatccacttagagaagtacccaaactataaatacaaaccccgaccgaaacgcacctgcattgttgatggcaaaaagcttcggattggggagtataagcaactgatgaggtctcggagacaggagatgaggcagttctttactgtggggtaagtattcctgaatttagccacctgggctttacttttgcggtaagtaactataggatggctactggcagtatgtttgggaaggagattagggaaagaggaggttgtggcatactgaaggggcttggccatgagaatctttgctgtgtcataggggcactgccttgcaccatggcttttgctcaaatcaagccaaacctggaacagttcactcccagctgatcacccctgtcattgtctcccaagccaatttaagatgctcagtggccacacacagagtttctggtagtttatttaagcagayacacagggaggaaaaataaaaactaaccttaagaaatccccataagctttccagcttctctgggtggtgcttctgactctaatcacaatagtctgcttttgttgtgggatctaccacaagataattggcctcgacattggttagaggacctcatttttggcataagatccagaactcctgttgcagtaaattattctgtggtgggascagtaacaatgtgtattttcttgcttaaatcagaaactagacatgcttttgatatcttcaagtctgatttcatgtcattttgtttaaaaattaggtaatagatttctggtataaatttcaacttggctgactggctgtctgcattcaaaagaggcccctcataaccacagtagtcaggataagtgsggatgmagatgactgtagattccagcatacccagacctagaagcacagcagggtggcaaatccagagggccatttgaggcacagacctgaagcagctggactcagagtagggaaacacttgggaaagagcttgagagagagaagcagagtaagcaagagggaagttgcatttgctgtgaagttggaggagaattgaggagctgtgctgtgccaggaaactaagagagcttcacttgaaggtagaaaaagaggtaccttaaaggagaagccaagagctattcacttttaagggcactcaagaggtaaccctgtggaacaaaaagttgttttcagagcatgtgtttaaaaggaatagtaaatagagtaagaaaacaaagccaatgaacgtagtctgggtcatgaatctgtgcaatacactgcagtgttttcgggaggagcgtgggctttggagtttgacttctggggttcacatactgactgtgccacctacctgggcaagttattaaacttctctaacttttgttttctcatgtgtaaaatgaaatgaatagtggaaactatcttgtatgattgttgagargatccaatgaggcaacgcttttaaaagtactttatatagtgcttaatacgatatcaataaaggtgaactctagcattatcattactatttaatatgtatttcctatcacagaaaaccatattttatatcacaccagatgatcagtgaatttctttataccatggcagaaccttttagaggtagagagaagcttaagccactttattataaaagatcccagtatgttaataaatgaagacatgacaaaataggattatcaaattcctctgtattataaatgtttgcatttttaaaggtaatgcgtttaacgctaaaaagggcaatgtggtataattgggctattcagctgataattagaggatttatgaaaaatactaattcatagtccactttaagattatgtgataaacattctcttttaatcccgttagtacacctctaagattgtgtataatctcttttgaacaatccaaagtttaagtttgggacctcttgtgattcctgccctccctcagtcatgttccctgtgtatgtagtgatacatagtggggctgttccgccagtctggaaggctactaaaggtgctgttttaataccttggtgtaatacttatttgaaaatatgagttgcagtaatactattgaatttagttccctttactaaagggtacattaaaacagctctagatcaaaataccacaacatgtaccaatgcatgtaaaaataaaaaactaaaacaatttaataacatctattatttattgactatctagtgtatactaggattttagatatataagtcacataattctctmaataagataaagaagttgagttttagagagtttctatggctacagaaaggtgataaagagcaaaggttcaaattcaggtattggcccccatcatgccaaatgactgaggaactgtctttactactttgtctcaaaatatgcctcatagccctatgctggcagtcatgagtgtggctatgccatctgagcaagagctcttagcacttggagaaaatgaagtctctgcttgtggtatatggtacataaaaagaactttgaaatttagagactaagtatcctgttctcaatagtgtagaacagtcctttatggaaggatcattttagactgcagaatagggctactgaagtgcaggcaatgatcagaatgtcttattctttcatctcaatgctgagcattttcctctgcccagctttgataatacttgctatgtagagccaggtgttatttctgcttaaggatttgtattctcttttaagtagttgtagttgatagattattaatttcctgaagtttttctttggaaattgatctttattasatatgaggttattacaagagttgagcaaaaaacaaacaaaaattcaaatatttctattgacgttttgatggaatgggttcagatcaatttttatagctgattttgaaaagacatgcataactttcaagccaataaaagtgcatatactgctcaacattttcatgcattttactgactacacaactgtggctgatgagttagttttttttattacttagctattatgaaatgaatttatcaataatatggaagggagcaatgttagcccttgccttggttttaacctcttcagttcgcagagtaagtatcagaatgttgtaataatctggataagattattatctggattattcaagataataaatgtgtgtgtgtatgtgtgggtataacacactattatatgctaatctattcatgtatgtatctggctttgtatatttgtttgtatgtatctggcttctccaactacagaattctctgaaactcatgtgtacagaaataatgcctcattyactatactaatttaataaagtgttggacacatagctggtttcaaakaggcccttaccaattctgagtgtggtgtccagaatattccctctactattaatgtagagggaatattcattagggtacatgtagctacaatgaygtcttcccaaagaactgtgacmgaatatacttccatttatttgaaacttatttggtaatttacctatgaactcatagagaattatgcaggtacattcagccctctgtatctgtgtggattcaaccaattgtggatcaaaaatattttttaaaaaaattcgagaaaatgttacattattgctaaagtacactatgtagttaggtctacagtggttgcatctgtatggaacatctacagactttttttttcttgcgtttatttcctaaacaattcagcataacaagtgtttacataacatttatattgtattagctattataaataatgagattgtttaaagtatataggggatgtgtgtaggttatatgcaaatactataccactttataaaagggacttgagcatcctcagattttgttatctgtgggggtcctggaaccaatcccccatgatacagatgtaaaactactataaaatattaaatttggggctacttttttagcaatgataaagatagattattgaatacttactgtgtgctgtgtactctgctgagtggattatacagattattgcaaatacaacaratttacaagatagggaatatcattctcactattaaattgaaaaatgcaatattcagagatgttaaataatttgtgtagggccacacagctagtaaatggccgagctgagatgtaaaccaggcttatgtgaatgtgaaacatatgtcccttttaccaaaggacattggtaaggacacgacattacacacacagaggcggtatagcattgtggttaagagcatcaattctggagtcagactagtctggctcaaatactagatctgcaccttcttggctgtaggaactaatacatggcaatctttattcctctgaactctccccttgcccttgggaaacatttaatctctctctaaccagtttcttcatatgtagaatgagaatgacaataccaatgacatatgcaggactcttcttgaagcctgagtaacttactgtttgtaaagtgcttagaacattgcctggcatatgaaaagctttaaattcaagtaaatattattattctagaaaaataatactgtgtgccaagtatatattctatgttatattacaataattattttagtgccttgtactataagtgattygaacatttgcattttaatcttaattttaaagaggtcgaatcaatcctatttaagacacctataaaatacaattacattagcatagattagccatgcttttttaagtattgtcctcctgtaaagaccctggattagaacattcaataggtaaagtgaacagattattattatttctgttccttcctgcagtatcagctacagagatatgtgacgtataggcttatctcctaatgaaacaaacttccttgtctttatttatacactttgaagggtctgaagggtcagcaaacaatggggctttgccagcataaatatgtagttactttgtaattggcaaagctagattacactccagaaatattcctgtaatttggaagtcatgtagcaatggtgggctctatcagggccagcttttactctttacttagactgggaggaagggttcttaaatatctctgttcatatcaactcatgtatatacttttacaaacatccacaaatgttgttttgatgtgcacattcattatttgtaaagcccaatacctgccagctattcctgtttgtgaaatctgcagtgtttgaattttgactttgaaattgatctataaaggaaggaaaaaatgctttttaggaaagcaatttctgatagacaaagcttgaacctgctggctggatttcttattttgttcattgatttgttagttaattggtaagggcctatttgaaaccagctatgtgtccaacactttactaaattaatatggtacatgaggcattatttctgtacacatgagtttcagagaattctatagttggagaagccagatacatacatgaatagattagcatataatagtgtcttatacacacacatacacacacaagacatggcacagcactgcatataacatttaatgaactactaatcttcrttttgtagacaagagsaaataaagctcagaggaagagagattattatgcattatggccaagcatgggacattcttgaggaagggacttgaagtttgggtaggtcagacttatgggaagtagattcctgctttagcatagaggagagcatgaacacctgggggaaaatgtggatatattcaatagtaaaaaaaagaagcagcctaaggctttttcctggcagtaaagaaaacataagatgggtagggtggaggaagattttggaagccattgaaagccaggtttcttcaactgtaattagctatgcacagttagtgtggtttttttagtctctttttatgctgataatgataaaagagagcaagatcagcgtgatggttagcttctgattttgcatccacagaattagttgcaacatagaaggggcctcagatgttatatacttcaagccattggaggagtcttccctaagttcttgaactcttccaagggtagagagctcactgcttcccaagggagctagttcctttgtggaacatttcctaatactagaaagttttcttttctgttaactaagccataatcttccttcctcctactttgcagattggttctaatcttcttctttcgtgtctcctagaacaaatctcccctttatttatragaataaccattcaagcgtctaaagatggttattttcatacagctagtctcattacatcttttcttccctgaaatagattacttagaattttcatttgttttttctcattcattcattcatcctatgtatttaacagatatttactgagtgcctcctatgttacaagcagtctgagttctggaactatgtcagtgaaaatttttgtctcatgaagcttatattctagtgatagaattcaaacaaataacaaacaaacaaataaataatagtgagaggtgccttagaacaaagtaaagtagggaaagggataggaagtttcagcttatagggtgcaattttaaatagggcrgtcatggaaaacctcactgagaaagcaacatttgagcaaaggcctcagtagggaagggagcaagctgtgcagatatctgggaaatgtgggcagagagaacagcaactgtaaaggttttgaggcgagattgtgcctagcttgttccaagaagaaataaataggycagaatgacaggagcaaagtgagtaggtaggaagaatagtagaaaagacttktaagccatagtcttcataataaggaaccaagttatgaaaagacttgtaagacattgtgaagactttgtatttgaccctragtgagatggaaaggcattgatgagttttaagcagaggaatgctttcatatgacttaggttttgaaaggatcactctatatgctatgttgagaattttctgaagggagaatggcctgtagcaaggaagctagcctcttacaataaaccagattggagttgatggtggtttgttccaggtttgtaggggtggaggtggtaagaagtagatgggttctagatgtattcctgaagaagaaccaataggatttgctgatcaattggatacagagtttgaaagaaatacagttaccatagattggcctattcaactggaaggatgaagtaatcattaaccaagaacaggatggccatgagaggggcaggtatgtggkagaatgatcaggactttaagttctgcacctatgaggttgagacagcatttagaaatccaaatcaaataagcagttttatatatatatatatatatatatgtaaaatatatataaaataagcagttatatatataaaataagcatgtatatatgcttatatatatgctcatatatataaaataagcattatatatgcttattttatatataatatataatatataatgcttatatatattatatataatatatattatatataatgcttatatgttatatataatatatattatatataatgctgatatgttatatataatatctatattatatatagatatatatttatatctccagtgagccctttgctcctaaattctagactcatatatatatataataagcattataatgagtctagaatttaggagcgaagggcttactggagatataaattgggacgttgtcagcatatagataatatttaaagccatggaattagatgaaatcaccaagggaatcaatttagatagagaagagaagaagcaaggactcaatccatggggacttcggtgcttagatggcagggagatgggaaggaagcagcatgggaacttagaaggagcagccaattdggaagaagaccaggagggtgtggcatctgagaaaacaagtgaataaaatgtttcagcaaggagaaaatgatcagctatatcaaatgctgcccgtgttatagatctgggtaacatgaggaccaagaactgacttttggatttaacaatatgaagattattgatggtgtgaccttcataagctctgtttcagtggtgtattgggagtgattgaagtgggtttaagaaagaattgagtagaagaaatgaagaaagacaactttttaaagagttttgctttaaaggatatcaaagaaatgaagcaagagctggagggggagatgtgccgagagaggtttttggttgttttttatggtatgagtgattatagcatgtttggtgggaattctataaaaaattaatgattcagatrggagagacaattgctggagagatatctttagtaaacaaaaacagatagtttcagtgcacaagcagaggggttagccttatattggattatgaactgattcaaaatatggaaaggcaggcagagaatggggcacagatacagggaggccagtcaacgtgacagtgggagtttgtgaaaagtttcttctgattgcttctaatttctccatgaaatagaaagccaggccattagcttggagtgagaaagggggagaagttggatatttgaggaaagttaagaaggtaggaagtaattgtctaggaggctaagagaaggagtaggctagracaatgtgcaatatgatggctgaacagcaccagaggcctatttgaagtacagcattgtaaatttagagactagtaagtatggcagtgtattttctccagccaagttcagctgtgtggctaaacagagtaggcagagagttaaattgaactaaagttgaagttttgctatgtaagagaatggagagtgtctgcaagggagtgagtaaccatggaattggaactgggtaaagaggtaagtgggggcacaagcagggagaggctcaagtaactgagggcagtgaaggtgggttgaaggatcaggaaaccgtagctcctcagatggggtggggagtgaaatcataaactgggtactaaagggagaaaactagaacaataagatgtggtggttagagagtgggatatttaaaactgagattagggaggagtgacagatgaaaatgacaaggtccactgtatgacaagagagcgagcaactaagatagggaggggcccagattatcacagtggyggggaggtcacactgagatagtcgggtgttggaatgaacatctacrgagatagcaaagacatcaaggatcatggcagaggttatgttgaagaaacagcaacagtgagccaggagctaacatctttaaggaatgagggggattgatcaggcagggggtagataaaggtatgagtgggtgacatagtctggtgacatgagattcaaagatgagatttttaggatggagggattaaaaagtaggttggacgaggcaatgaggagctaagaagggaactaccccacctccaggcccattcatgtgagggggatggaaagcaaataaccaactcttccgagggccttagggagactcgtggcctagagagagagccaagtttcagttagagtaagaaggtgagtcagtaaggactgacagttgagttccagagggtataatggaaatatttcaggaattagagaaaggagggagttagggttagaaaaagggttatacagaaccaaatgttattctttggggacttttttctttttaaacatttcttagaagatgtcaacattttcccttctcagatgcccttctctacagttctgcggtaaagaggaagtcctctcctggccaggcttgtgaaccagagtattgttttacaattaaccgccaattccaaatggcttctgtgggctggcactcacggagagtccaaagcattaccttgtcatttccttggtgctcccccagacttagaacatgcttgctctctgtgaggtttacaccagcttcccaaaggaggaaaggaaagggaattaacattttcgtctactctataatgtaatgctttgcatatatgttcttacttaatcttcacagtcctgtcaaatgtgaatgttctaatttatagacgaggagaggcaatgtcagtgataataattagcctgcccaggatcacacagccagtaactggtgcagctgggatttaaacccaagccattctgactccaaaacctgagctcaccataccacataaccttcttcccagaaggcttggagaggcaaaaatcatctctcacagggakaagttctcactctagcatttatgtacaacctcgaacagttgtatgtgaatgtgagaaccttaccagagctggactcccttcatttcctcaaggtggggagtaacccctgggtttttaccctcactggcttttagcactgtctgggggcttaaaacagccatatwtatctctccactcccaggactaggcttttgaatatcatgcatctcactctcactctagaaagtaaattgtacagatgttttatttgcttgtttatttatttttagcattccattaccagcttaaagtccaaatactctgaactatgtggagcccagtgtagaagattttgattcygatttaaattgctaagttttttctgatagtgtgagcttgcctttctcaccctgatcttgatatgtgctagggaatttgtgacacggggaaggttcaactcctgattatggtacttgcgtggccttgaacaaacagcttgaattttctgaaacttaattggtcacttcatgtgtaaaagagggaaaatgatacctacctctcaggcttattatgaggattcaagaagataatgtaaaaacacctaaatatagttcccagcacataatacgagctcaatttaaatttattcagtagacctattgatatagatattctggtaaaaatactgcaaaaagtgaccatctattctttgtgaaaaggaaacgtatcatttgatagtgtgtttttatgcagagtttgtattacagatcagcttgccaaattgggaaatctgtaaaatgggttaacattgcagtaaaagctttccctctacactcataatgtgattaaggcaaaaacattttattgcagttatccaaattcagtaaaaaaacyaatgaggcattataaggttagcataaaatttaatttgtgttaatttgcccaaaacttaggaagccagaagtatactgttttaaaatttgattcaataagagggaactaatattttatatgatgtttctatacatagatttagattcctctattatctgcttccttcaggcaaccaaaaaactcaccatgagaatcataaaaactgggtcaatgtcaagtgcttagtgtcaactaggtgctgacaggttctatagaagtcaggcatttttatgatatacagtgagcttagtgtatctgtagattgaatatctataaaggaaagagtgatgggattcaagtcagccaatggcttagattcacattctggctctgctggttattgaatgcagggcttgaagcaaggtctgattttcttcatctggaaatggaaaaaataataacttatggggccatgatgttaattgggtgagytggtatacctgaaaatattttatatgttatgttagggatatgatgtgccttgtggtgattaaaagagattgctaaattcagcgtgaaccaatatctcacagagtgtttctaaaccatctgcatcccttctccctctgccaggctggagggcatggaggtctttgtgagaaaattatgttcctctggacatgtcaaagaataaaccaaacaccgcatattctcactcataggtgggaattgaacaatgagatcacatggacacaggaaggggaatatcacactctggggactgtggtcgggtcgggggaggggggagggatagcattgggagatatacctaatgctagatgacacattagtgggtgcagcgcaccagcatggcacatgtatacatatgtaactaacctgcacaatgtgcacatgtaccctaaaacttagagtataataaaaaaaaaaaaaaaaaaaaaaaargagagagctaacagaaaaaaacaaaaaaaagaatggcaggtagctaagctacttcttcatagattcagagtattttcctgtttgagtgagatggatagaaagtttcagtgataatgtgtagggtgagtaagaattgtccaagtgataattgacctgaagtcatgagtacaaaaagtggaaggaccttccagaacttccctgaccccggcttgtataaatatgtagaaacaaaggctccaaaaggatagttacaatgacaacttgaaacaaattcaactataatttactatccattaaagattgagaaactcttggtgaatattgcatatatgaaaataatattttcgccatagtctctgagttaggtagatgtttcattcctgtgtaccagttataatgccttaagtgaagttaagagacagtaatcatgtctccctgcagaggaagagattgacctccacaaaggatctgttaagtttgtttaaactagggtaacattatggaggaatgaactggtgtccaggccttgccaccctctgggatctagggtgaggcagcgtatctggtgtctactctgcaactctactctgttgagttgcagaggtctcactgctctttactcccaactctcttaatcccaaccccagttccagcccagggtctcagcagtaatgacatccaagatgatccttccacagggattattcctaacaagttcagccatggaaatatgtagacatttacatgaataacaaataaatgctttgctgaatctcactctttgggacatgctaggtcccttctcatcttgatttatacatttctcaaaccaaggtgaagacacaaacctgcttaatagtgtcattataatatgtttcatgccactagtctaattttcaaaatgtgctgggagatcttcaaaaattatttcacatgtaacattgtggaattcactacatcatttgttcctaatgccaggtgttatccaaactttgccatatttaccaagttaaaagaaccctgcctttatgttgcaaagtcatcagtaaattgctccatcatattgtttaacccctaacatagcatcaaggagatttgcagtactcctccagggaacacctttgtcacattttatttgcttagaatgttatttaacatttatttagggctcccttttgaaagtgtagggtgtgaattccaatgctgtacatagcacatatatagatatttctcccttgtctgattttgtttcttgaatctatataggcaacagcctcagattccaatcaccacaggaacaggtgttgtgtatcctggtgctatcactatggcaactaccacaccatcgcctcagatgacatctgactgctctagcacctcggccagcccggagcccagcctcccggtcatccagagcacttatggtatgaagacagatggcggaagcctagctggaaatgaaatsatcaatggagaggatgaaatggaaatgtatgatgactatgaagatgaccccaaatcagactatagcagtgaaaatgaagccccggaggctgtcagtgccaactgaggagtttttgtttgctgaattaaagtactctgacatttcacccccctccccaacaaagagttattaaagagcccgcatgcatttgtggctccacaattacatcagcagaatggtcttaattgtttcgtaaagtgtgagacagattaagttttccctgatttttcatgaacttgagttttttgttgttattgttattgttgttgttgttgtttttttaatttaggtgaagacatattaaatatgagacaccaggacttgaaacttatctcaacccgtagatgtcttacaagtcttatatttttgtcttactttttttttcttttggatgttgataaaggtttaagttactgttttagatggggttaaacattctcactcaggtatgctgtgccggcctacaggttgtgaatgtgtttttattctgaattattttagaaaacaactgaggatttcatattgtgaaacagaacaagtccacggcgtgtgcagctgcatgtagagcatattcaaaaggcctcggaattccaattttccatttgtagagttaaactttgaatgtgccaaactttttcgtaacttttgaatcttaatattttgaaagtcttaaaggagacactgcaaagtcttagacaatctttggcatcttaaaataaaatagcaaaccaacatttttttttccagaaaatggtaaggtactcaggaatctggagacaagatattgtaaggaatgaacaaggttgccacagtgcatggacccaattgtgtttgcctgttgacgtgccatcagtgcgtgatgtggtatgacatacacacaccagagcaaccgccacaccagatatcgacagagtggtcttctctgcctgagaccacctctcactacatccattatccctttgcctttaaccctgacattcagtcttaacacattttatcttaaataatttattcattccagaatgtcaagggtccacttgctatttattttttttcaattgttggtggcattaatttaataattcttgtttttcaccttccttccccgaagaacttttccgtccttttcacctccttctcctgtgtacatagtgattttatgtccccagaacgcctggaagcatttctgaaaccaagatattattaaaaacctattattgtttttaatcatgagtatgtatctggctgcagggctgtgtattgggatataggtatatagtcttacacttaaacaggtatgcccctgaggttcactgtgacctcaagtcttttgccagaattttcccctaattcagttcacaagyggtagggtctgcatcagtggcatttccccctgaattccattcagcagcaaggttcaacagtggtgactgccaggcaggagagtcctgcggccaaacctgaagcccaaggctcgtgggccatgcaggaatctcagtgaagctgtcatgggctggcacctttacactgagttgccttgtcccagctggcacatctagggagttcattgcaaaatccccaggatgcaaaaagccacatgacagcctcagagcaaagatggtggcaaatagtcatgatacatctagagaatgaaagaaaactgtaagggaggagaaggaggggaatacattccctatatgggatgttcctactgttaactctggggaacagatagctccgggggcagcagatgagttcctctggctgactctatctgtagccacatggggacctgcctacgtgtgaacaaaatgaactgcacttatcacacaaggatttctttgaagacatgctactggggtgggaagcagtgaggttttattccccatctcctaactacagggagctctgccatgtcattttggccttcctgaaactaggacaggttgtctatcggggggcttcccccagagaggtttagtgggagaatgtcagtgaatgggatagttcacctcatgggacaacccagaatctgatcaccaggacataggaatggccccatcagatttcttgagccattttgtcacttggaagaaaatagtgtacctttgtatttatttaagagtgctcaaggcctaatagcaataaacaggtctagccaagaaattacaagctattctgttagctgggagtgctctctataagctgattaaggtactgataggaactctttgttattcatgttggttggggattagaaatttgtttttgtacatttatttcaaatgaggaggaggtcattttttctctcaaaaaatgagtatttattattgtcttactgatttctttgattatatacctctcctcctcagttcactcttgttttttttctttctctttggcttttgcttttgctctctctcacttctttcttattttgttgcattggtagagtgttgtatggctagcattgtattgtatgtaattaattttgcacaaaagcaaacatttagcatagtaggttaattttgtttgtttttatgaccatgccaaaataatattctgggctggtggagaacaaaggactgttctttaggactgaaacttgattttgctcatagtaagtaaaaaaaaacaaaaaacacacacactcacagatgttgtttcgtaagtgttataagcactggatataaatggtattttttatcacttctgactaatgtgaaactgttgtacgaaaactacatgaacaaaagtcatctgtttcgactcgtgtgggcttgcctcacagttgccggatttgagtcatttttatgtcttgttatttcatttatttatgcaaaatacatgtgtgtatgaacactttgttttagctccagctctgcctcagtactggggttcatttacttttagccatgttcttaaaaatgaaaggctattcaggaatgatctgattgtaaacgtctttttcattggatcaaacagtaatgctgtatttgaatctaaattttgtgtataagcagtttatttattagccaagtttggctctaaatatccatggaaattaagaatgacaatcatagggatcaattcattttattttcagtggggcttaaacaaagtttatatgactttaccatctcattttagatttttstaattgtgtaaatataacatagaaatagaatttatttttggttcatgaatacttagtgagatataagttatgtatttcctttttgttctctatccatagatgttggtccaaactgaaagttgatgagtcactgtgcctctcggggtagtgagttatcagctacagtgagagagcagtgtttggcctgcagctgggacagcaaaacgtttcaccagggttctcatgcagttcagaacccactgtccacagatccagacatttcccttttttcttacagaaagttgatgattggacatactaaatttccactacagttaggagacagtcagtttgctttgggagtctacataaatcttctaagatagttctgtgaccatttaatagcaagaagcatgaatgccactacaaaggcaaaaatccacctctgagatcggccgttaataaacgtcccgtcatgtcagtttagattcaagaatgttaagcaactttgtttttgcggtgctccctatttcatagtatcttcaaatcaaaaataaaaattatctccattttgttaaagaacttacagggtcagggttctccttgtcacttagaattgggacactgccaggcaatcctctcccaaaaaaaaaaaaaaaaaaaaatagccatatggaatggaaggaaaaggagaaaagaaggaagaaaggaaaaaagtaggaagggagagagaaaaaaaaggtcgctttgcggatacgagccgctaggctgacaacttttctatttcattggcagatatgaagcagtgtcttttccagtaaggtacggaagctttgttgttttcatgtgtacccagctcagccttttagaagcacctcggtttgcttcattaggtatttgatactctccagccttgtcctcaggcctgatttgatttgccagggtcctgacaccaaagcccaggccaagttctaaattcaggtgtgggctcacagtgctattgagcttgtcgaattctggcctcccctgaacattagccccacgggagcctgagggtgtttgaaaagggcgtgatcactctagggctgaaattaaaggctgctttcttttccttctgaagccaggctgcttcttcggagtacaccctcctgagccaggagcacaagcactagcagaaagcagggattgtttcaggaaagcccatttaccctcagtaggaaggcagcctggtcacttgaacagcacagctgaggctgcttctctcaatttactcattttgcaaagaattgacctctaccaactcattagggagaggaaaaagaatcacttagtaattttaaatcatatgagaagtcctgtaccaagtgccaacaactgcaaagaaatgcagctagaggaatgtattgaaattactactgggtcttcctttttaatgagaaaatgacaaaaatggttgctgtagccctgcctgattttgtacacgtttgtctaagaattgagttggcacttaagctcacttctcaaagtataataatattgtatgacctcatttgtcctttcacaaaagcacttgcatcatttccttaagtcatctgctccctgacatgttttcttccctaataaacaacttctgtctgttattcctgccaatgatgttctgtttctgatgccatatcctattgagcgtgcccctgtactaatatcattgaaaatattgatatgcaaacacatttccttttcatccccattctatctttccctttggggacagattgctttccaaaagctcatgaacaaatatttggaatgctggtacctttggggcagaggtaagggtgggcggggtgggggcagaaaggtaatgcttaatgcagataactcttctaatcagtgtccatggcaatatgaacgcttgaagaaaactcagtgacatatcttgctcagtagtttcttattcctgaagaaccacaagcataaagtgaggcctcagtgctggtgctcttggagtatggggaatgtgcaaatatttaactgttttgtatgctgcacattgcaggtctgctcatgtgcattctccctttgtcttcctttgtcatatgtgtttttgcttttttgaaagtgcagtctttattgtaccctcctccagcttgtagcaaattagaatgcttagcatttatgttcattcattattgtatttgccatgtaaaatttttattaccttagacaagcttataagctgttactacataacttatcttactgtaactcttttatttcccccgacgttgtaatttgtttgtgatgtatattgtgaaattgtattctatgttaatttaatcagcacaattcactgacatgctggactgacatgctggctgctgtttcaaagtgtaaagtttgtgtagggctgttgggacaactgcaactctgttgtcaaggtactgtgctttggttcctatagcaacactgggtgtggcccttgaattgctaagggcatttaatacatcctggagcaaattttaactgcagattttctttgtagaaattctatgtataatgcaggtacctacttggcccatggctggtaactatttgggcaattagaaaaaaagaaaaaaacataaaaactagtgtctattgctgctttgaatatgtttgaaagtctgaaaatgtaaatagtttatcaaaaaaaaatcttgtacagtccagtgtaaagtttttaaatgaccttaagggttgccatcacatctttctcacactctcctcttgataataataataataaaaagtttgctaaggattaaagaaatgggaaaaataaaaaaaatctcttcaaatttacaggaatgaatcattgttcttagctttgttgcatacacaaacttcttggattttgttgtgcagtattgacgtgagataaagctcaacattgaataatctttcagtggtacttttcaaagtcttcccctcctctgcctcataattaagggaaaagacaaaattgaaagacacactgtctttatctatcctggtgtatgttggcaccttagctactttttttttttcctttttgcacaaggtgctttcctgatatgttcaacatgccatctttgggtgataatgtatatgccgtgatggggctcaggccccttaggggagtgtctataagaactgcctatttatgctcatttacctcaagactgtcctctctaccctaatctagttgtcatcactccatcttttgtactgctgttgacacttacaaattaaagataaattttgttttatgacctctgtgtatggccttgtctgtgccctgcaaactgtccccaccatggggccccagccagccctgaatgtgccaccctcttgctgctggagcctgcagagctctcctgccctctgccattgcttctgcctggcccaagggtaggtctctgaaagacatggaaccccttagcctggaaagacttgcctgctcttttcgttgtggagcacacctggctgcagcaggaaatacttgtggatttagaagggaggaacgggatacaaggtggatttttgtcaagagaagataagagagcatggcattgcctctttacctgacttcttcgtgtcagtgaaacagcttagagccttttggagtatgaacaactctcaagggccagcctctcatctgacgccaccttctacgagcctagcagccaagagtggaaaatgctgcacttatggaacctttccctccactgtggttggcagtagttggctgattactcagtaccttctgcctcagagaagaaagagcccatctttttgtccagcaatgagttgcatccagagtgaaactcggttcccagtgatatcagcttctaaaatgttgccaaagctatttcattgtgctgagtctgagtggggacggaaggtgggtagtggggtgaagtgagcagggcccttaagggagacttgccacaccagccaagccagtcctgtgagtctagagatgagtaaccaacacctagagagtgaaacaaaagtgttcaagagagaggagaggcccagccactccttttgatatttcctattaaaaaatgcctcaggaaaaataaatccaagaatatgtgggactgactttattccagtcacattgcaagttagacgcaggctcctgtaagttctgaaaatctagcattccgggacctccctcttgccccatggctttttaaaagcccaggtaagtacaggacattggaaagaacagggactttggagtcacaccagcctggctctgccacctgccagctgcgtgaccttccctgaataacacctctgagccacaatcctctctataaaatggggtaacaattcttacctgtcagggtgctgggagaatgaaaagaaacagcaggggtaagacatccaggagtggatggcacacagagggcatgaatgcccactgcctcctctgaccagaaaatgcctaagctagggaggttggctggtgttaccactgagtaaagtgaaggaggtgcctgaggccttctctcagagcctggtcgcatacatacctcagggccctccctctaagctagtctccaagccacaggttttctcactcccagctcatccttgccattgctgcaggtcttctttctaagcctgtcccctctcatccttctctaaaaccttctggctttctgctgctgactagataaagtcccaacttcctgccctgtcagccaagcctccacagacctgccagccccatgttccaccgtgaccccacacaccttccatgctctctgctgctctcacacccccagcctgtccaccactctggggcttttacttctcctttagcctggaaggaatctgtccccttctctgtttgggaaattcgcagttatctttcagaagccacccaatatcaccacttcctgagaccttcttggccccctggtttcaagctctccctacggagaaagcaaagagctctttgaaagaatctcacgatgagcacattgtaatgatttgtctctgtgtctgtcttccctgctagacgacaaactgctgaaaccaaaaactgtaccttggcctgccctgcccccaacacagtgcttggcacatagtaagtgctctacacttgtttgtggaaggaatgtatgagggattgcaacttggtctccctgtgtgttttagatgcctgtgaatatcggggtctcaggtggtgaggctgagggatcttgtaggtgtaccttggtattacttacttcatttggagaacgttattagttaaaaacatctctattcatattgggagagccatttttcaagttggcatgacaagcacaaggcactgagagtctctatgcttttaggatgactcactgcagaatgcctgagcctctgaacccagagccacggctctattcttcctcctaggcatcctggctgaagtatgaaaaggacagactaggaaggggaagtgtttatcagttttccttaccttttaccttgacatcccagatacgcaagattaccctacagtctgctcagagacaaggggttcttggaggcttgacctctgggcctccatcatggaaagggaaggagaccagctgcctctgcctgctgtggagagccagggcagtgatcccacgaggctgcaatgtggacagctgttcacttagtgtccgttccttcctctttggtccaggtaatgactccttctctcagtagtgctctagagccttgctggctcaaagtatggctcacagatcagcagttacagcatcacctaaggcatattaaagtatgggctaatgtggcatgggctatactgagtagaaagctcctagcagttgagactccatgaactgtcatctacgtcctctaagtcaatgacacatcatatgtgagataggattttcctcatttgaattgtgaaggcccagagataggacatgacccacccaaagtcacacacagattaaatgtcagtgtggtaacatgcacttgtgttttctaattctaaacacaggtgaacgtgttgcatatgacctcacaatagtctgtggaaattgctcatcactggaacagccctggatctagagctcagttatcaccaggtgtcctggactgtgtcacactatgggagcaccaaggcatctaggggcagtggcctctggcatctctgactgtcatcctctaccctggctgtgcccagtgcctggcccacaagagaccctggatcaatagggtggctctctggagagcttgttcagagcccccgctgttagctagccacccagtaatttttccattttgacaccaggatgagtggccatggagtagatcaatgagaatatgtgtaggttctgggggccccattcctgagtctgggaggaggacacccagtgaagagagtgatcagggaaggtgtctgagctagtgtcacccagggcttctaggaacacgtgtggattggttatccactggcttcctaaactcaccccgggcaggcacactgactccccagcctgtctcccccaccactgtctcccctcagccactaaagactgagcactgtccctgccacctgttcggattggtttatccactactaccagctgccatt

SEQ ID NO: 96775 - DNA, 437867 bp, Homo sapiens
gaagggcagccatgctcttctacatctttcttggcccaggtggagggttttgtggttggttctgggtaatgtctttgaggagagccatgagcagactctagacttgtggccaggggaggtttgggggcatttctcccaaagaagaagacttggctagaggtggagagtgagggggtgcctaggaactacctctgggaaggaactgccatgggtgagagggagtgctgtggactcctgcaacaggttaaaacccggtaaaagctgtagaaaggcctactggtggagcctaagaaaaaaatgtgtgaaaacctcatgaatcaagtaatgaagtgggaacctcagcaggcactgatcttgccatctttagcagtaatataattatttattacatgcctaataagtacctagtactgtgttaagaactttatatgcattatcttaataagggagataattacatgtaaagtggtttaaacagtgtctggcacatgtgaatgctcactatgtgttagctattgtcattatctaatcctcacaataaccctatgaaagaggaacctttattgttcccagtttacagatggagaaaatgaagctcgggaagttaagtaacttactcaaagttgcaccactaatacttagcaagccagaatttgaggccagggctgcctgactccaaaactcaccactgtccctaaggggtaaagagggactcatatgtttggaggggtaggaaaagaggcttcctaagcctgttcttcgtctaaggttctgttctaaaactctccctcttgtccatcctgggtcccctttgttaataatctaattgtttttgaaacctctaaatgagagaggatttaatccctgttgccagtctgtgttgttctggagaccacccaattacaagctaaatgtcctttctgtgttcattcaggacctgtcccactgacctgaatcaatcttccacagttctcaaaccacatgaagagtatgggtaaaggaggaggctctgggctctgctggcctgccctagccttgccgttgactctttttttttttctttgagatggagtctcgctctgtcacccaggctggagtgcagtggcccgatctcgggtcactgcaacctccgcctcctgggttcaagcaattgtcctgcctcagcctcctgagtagctgggattacaggcccatgccaccatgcccggctaatttttttttttttagtagcgacagggtttcaccatgttggtcaggctgatcttgaattcctgacctcgtgatccgcccgcctctgcctcctaaagtgctgggattacaggtgtgagccaccgtgcccagccgctgttgactcttgaaggatttagtcatagactctccaggccagacactctcctccctgataacccaaaagaggacccagattctctttaactcagtggagttccctggttagctcatttcacttctttctggtgtggaccctcagcagtgttctttgtctctttaaggctgtcctattcagttctataaaggcatcttcaaggagaggcaagtagagcggagacaaatgcaggaatttggggtcaggcaggactgggtttgacaggactggtcagacagtactgggtttggacccccttgctgcctctgccaagtatcattaggtacaccatttcatcaagctgtaccttaatctcttaatttgcaaaactgggatcctaacaccaatttttcaggcagatgtgaagattaagatgatgcataccaaggtgtctggcacagagtaggtaggtgtttaataaatggtagctattgttattactcaagctgtgtcaccagaccacatatgatacctgaaacctaattttatggtttaaaaaacatgccttgtgaaaagggatatgcaacttagattcattcagttagtcttttttagagccatcattcataacttaccatttttaaaaaagcaaggaaatgaaaataaataatgcacttcaagaaaaaaaataggctgccaactacttggttgaaagaaacatttccatataaacatgaatgagaaataacatgggagatgtttgcaaagatggcatgtgtgtgcctatgtgtgtgtatgtaaaccatacacacacacacacactctctctctcacacacacacacacaattgcagctccacccttccagtctcaatcctatatattagtttggtacaaaagtaattgcagtttttaccattactttcaatggcaaaaactgcaattacttttgcaccaaccttatatcaactatatatatatagtttgttttgttttaaagaagaaagtgagagaagaccttgctgctgttaggagttagagtagaggcaggcatggataacaatcaaatggggaaaagggtgttaaaaactggacccagttcctggaaggaggcagctctggagggcagatctgagcagccctgggtggcacagggtgtcagcccaataaggaaggagagcagacagcagagaaaggcctggttagcttcccagcatcaggatcctgttcaaagggatggagtgtcatgttgacagggagccagctggaccatggagccccaaaatccccagaaaggaagcgggcaccatctctcaacctctgagctggggtttagagactggcttctgtgtgtaggcagagggtttgtgagaaaagattgctaaggaaacaggattatgcaaacaagataataatttaagccatacagacctgggctaacacggatgtttcattacttcctggaggtgcaacctgagcacgttgctttctaagtctctattacatctcttaaaaggtagatgagttcaagggaatcaagtgttttccacattctgggacttggccaatgcattttattccaattaataagaagcacaatgattagccaattctcatcctctcttctgcttataccctggcctggccaccaaatgtgcttattgtagtagagactcctaacaggtattcctgctcacgctcttttcccctgctaacggttcttcactctacagccagagtgatcctcttaaaatacatcagatcatgtcactgctccacccagtagcctcccacggttgctgtttcatgtgccctcccagtgctgaggccccatacagtcctacctgcctttgaccttggatctgattgctttccctttgcccactctgctctaccacattggcttccacattgttccttgaacatgccaggcacactcctgtctcggagcctctgcccttgctgttcctctgcatggaacactattcgcctgtctctcttacttaccttctttatgtctttgctgaggagtcaccttagtgtgtctttccctgacctccctatttcaaattgcagccccactctgccagtctcaatcctctttcctgcttttttgttcaccatagcacttttcataaatgggcatactaacatatcttcttcttcctatttattgtttctctttctccactagaatgtcaattctacaagggcagggattttgttctggttttttccttcctatatcatcagctcctaggacagtgcctagcaggtagcatgcccttcaaaacactggtcaaaggaatgaatgattattataaagcaagacgctggaccccagctctggaggaacatgcattctaggctggtgactgaggcaggaactcagactcaggaagcacatcagggatgcagttacccaaactgtaataccaggccagagtaagatcttggaaccagagggatgcccaggcattaggagtgggctgtgagatcagagattggcctggagccatgctgatggagagtgagattggtgccccctgggtcagggcagatcccaggtcatgagtcttggggccaggtcaccccaccataaaagaagacagaggggctgtagggcaggatgccaggtagggccttcaaccccttagtaaatgtcaggcaaagttacccagctttcaacttattcccagatgtaggtgtcagtggacactctatattggcacagcttgcaaggaggacacaaatgactaaaggaaagaattagaaaaaagaaaaaaaacaagtgaaaatgttcattcagaaacctgagctaagggtttgaggaatggcaggtgccagaagactatgactggaggatatttgtgatgtcaagtgagacagcagttgagcgagtatctggggattacactgtcctttggaccatttctttccctccctcccttccttcctcccttcctggaggagatgctcaggtgagttctgttcatgcaaaccctccagcttggggaaaaggaaatgccaagtggagccgggagaggtggagtctacagaatcctggaaagagaagttagggcagagagaatttggcctggtttccctggcgctgtccaaggtactctctagtagttctgctcagcctccactcacatctttgtgcttcctaacaactcagcctggattcagagctgcccttgcctcactccagtagagctggtgtgtggccatcatcatcatcatccggtccaaatccctcaccatatgccggagggaatcgatgtccagagcaactgagtcagggcagtgctcctcctggagaggaaacttgcagtcccacatccctggctcccactgcactgtgcacggagttcctgctggctctgggttccggtccttcagtagctctgtgtgcttccactagctacagaacctctctgagcaccagtgtattcgcctgtaaagtaagggtgagtaacacagtatgcttacagggcagttgtggggattacatcataaggcacacagtaagtactcagcgaaggtcaaacttccattcttgttacaaggtcgtcgatatcttccacagtccctggttcaggctcaagtatgttttgtgatttgatgtcctactgtgttcctcgcattaatcagcccctgggactttatagattaatgatcacgtttcctattcttgaagtatgcagaggcacaaggaacccaaggtcttaggtcagctcactcgggtacatctggctcgggactgctttggctaagattggccagtgcgacctggcggagagagggccaagtccaggggcgcgcggccccgccctggcctgaggatagtgctcccaccccgggagacttctagggcggggcccatcaagaatggggacgcggggaggtcaaatgcctggagggggcggtagcgcacgtaaggttgggaccccagctttgcttggggttggcaaagggcggtcgctccgtctggtggggaggaaaggggtgtcctcagccaaggccctaaaggccgggcagcctggcaccaacgggcgttcgagcacccgtgggcgtcttcagcgacccccgggactcggtcaggggctcgtgggcgccagaaaagaacgggagagcgtaggctgcagatgcctctgggacgccttcgtggaacattctcctgcccagaccttcccggccagacctccgagaagcggttccaaaccaccgtgcaggtgctacaggcagcgctcggcggagcggcggcggccactgcgtgtgccagcgcgcggtcccggttcccagatcgctgtccccgggcgctctggtgcctggaggtcagcggtcggcgggcagcggcagctggcgcagcggagggccgggggcgcgtgtgtgcgtgtgctgggaaggtggccctccccgcggccgccgcagcgccagcgcctccccctcccccggcgcgcacggctcgtccccgtccctggaggcggcccgagccgcccctgagcagcctcgccttcgcctcccgcgtttcctgccgtccgccctcccccggccgagctccaggggctgccgcctagcagctcccggcgggagagcggttcagagcgcgcacgggggcgggcggaggcggcccggtgcggggcggccgcgctggagagaggcgcgcgcggagacgccggcccccctctccgcgtttgctcgcttgctccccgcctcccgcactccgctcgctcccaccccttcccggcgtgattgatccgtcacgggcgccgccgctgccgccgccgccgccgcggccgttctgagccgagccggaaccctagcccgagacggagccggggcccgggccggcgccattgcgcgggcgccgcgggaagaccttggcgcggggcggcgggccgggccaggccatgcgggccgagtgagccggcgcccgcagcccgcggcgcggcatggcttccccgcggagctccgggcagcccgggccgccgccgccgccgccaccgccgcccgcgcgcctgctactgctactgctgctgccgctgctgctgcctctggcgcccggggcctggggctgggcgcggggcgccccccggccgccgcccagcagcccgccgctctccatcatgggcctcatgccgctcaccaaggaggtggccaagggcagcatcgggcgcggtgtgctccccgccgtggaactggccatcgagcagatccgcaacgagtcactcctgcgcccctacttcctygacctgcggctctatgacacggaggtgagtgtccggctgcccctgccgtcggggcttcggggggcattggggtgggtggtttggacacaggcaacctccggcctttggtcagatccccgattgaccggcccgcgcctgccgagggcagagagggctggtgcccagtgttcacccccgcggtcctgctgggcttggctggcacagctggtaacatttgccaagcaccccctcctctggtcttatgtgtgtatgtgtgtgtggggaggggtgggggtgggatagaagactggggtctcttttgaccagagaaaaaggagtggagaaggtgggggctggacccccaaaggcctacattgattgtccctgtccaggtcccgctcatggggctgcgaggtaccgagtgggaggaacaggcgcattgactgcaaactgggccacccagggccggaggggccgcgggcctgctcacaggcccccagggaagccgagccgcgctttgaggtccggaaggctccggaacccaaggggcttgagcgtgcagcgtggctgggcgcctggtgcgcgccagcagctctgagcccgctccgcgcgggcargtgtggggccaccggctctgcagcgcttctgcctggacrtgcccggcgctgcctgtggccagagcgatttcaggagacccctgcctcgggttagttgctcagaaagtgccctggcagttctcgtcccggacgtgcagtggtgtccggccgcgccgctgctgttggccgggcggctgcaggcagtttctcacgsctcaggcttgaagcatccgacctagcagccggagcacagacttggagagcagtccggagcggagccagagagccaagggctttccatcccaagacccctccccacgccctcgrtttgggttctgcctgaagccccagagcggaccttcaccgccaggccggggctggagcgcgcggagcgggtctggaggagcgatcgctggccgcgcaaggtcgggtttgcgagtttttccggaccgagcgagcccctgtgctccgaccgcagcgtctgagacgcggcctgaagggggcagtgatttcctgtgcagtacgctcggttggcgcctcttccatcgcgcggaacggggccgaggcgctgggcttgatcctggcttcctgggactctccgggcgcttctgctggagtccaggtgcagaacccttttgggaggagggtcgcgctactgctctggtggtgcaatctgggcttcccctcctccttggtcggrccctctttatgtccccagagaaagagcagaatctagattgtatcttattccctgcctcccccgcttcaccggtgaaccagcttgctctgcgctgtaaataaaaggtgaaggaaccggtggcagttggcagcggtacgcgcaggctgctgcaggcggagaggcgtcctctgccccagaggatgcaagctggctggctgtgcagggctaacccggtgtgaaatcatttccgaatgacattcctatcgccctcgtctttgcctgagcatctcaagttctgtgggggtacttgtctggcacacataaatggagacagcaatgcagttacacggaggcatatcttcttgacagtttctctgttgctactgcacatattcttctggaggggtcactgcaaagccggtcttttggggacaaacacatttttagatagggcagccctgcttgcatcatcaccaagtattgtcagctgcataatgttttcatcatcagtttcttccctttagaaagcttccctgaaagagatttcatactggcctgtttgtggcagcaaagagatgggtgcttcgtttcagggtgtgggttgaagcctttacattttatttttcgagtgtgtcttgatgactttctgagtgaaaggacccaaagtcaagaggatgagacagtcagaagactcttcaattcgtgggaatatttagaaaacagtgggaaggaagacagaagataattttagcttcgtgcaaacagagaagtgtctctagccttttgaaggggcccagagccagggctttggggtaggtggggcctgggttttagtgagaaactggttactttccaccctggatgaccttgagctgggtatttaatctctctaagcctaggtgggaatattatgtgtactctgcaggtgacacacagcttaaggaagataacaggccagggtagaagatgccctgagctggcaggctcagcggccagtgctctggcatgctgtaagcactaaataaatgtgtcctgctgcctcccctcctcctcctccttcttttttttttttgttttttttgttttgttttgtttttgtttttttgagatagagttttgctcttgttgcccaggctggagtgcattggcgtgatcttggctcaccgcaacctccacctcccagggtcaagtgattctcctgcctcagcctcccgtgtagctgggattacaggcatgtgccaccatgcccagctaattttgtatttttagtagagatggggtttctccatgttggtcgggctggtcttgaactcccgacctcaggtgatctgcccacctctgcctcccaaagtgctgggattacaggcatgagccaccgtgcccagctcccttccttcatttttatttcctgtgaattcacaagtggccttatctttaaagtagaggtgctttctccctgagccagagtgaaggaaggatcagtctaggtaatttgcagcaaaatctagagcgatctaaagaatgttygtggctagtgttagagtgtttagggtctagtttattcagattggctgtctttgtggacactgcctaattatttgcaggctgtgtcacattgtttgtagactttaacacagggtggatgtggtgaacagattttggctggatttgctgacatttgctgtcaatcagtggcctcaatggccagtgactatgggcaccagtatggacctttatccatatgatctgcagagagatggagatttagcaaggaatgggttaatctggtccctggggacaatctgtctcaataaaggagcctcctacaaccagattgactctcttctgtaagtagaatagtggtagattttcaaaacctcactcaatgccatgtgttggtaaaaatgaaacagcctaacagaatacctgtctatcagaacctctgcttctctggtgtaacaccaaatggcttcagcaaatactcgtttatatattccaatgaggatttgaacaagcaagacaactgaaaatacagataaaagaaagcatcagaaactatgtagaagcatagaagttactataccaagaacctgggctaaaatttattgcattgagtattatattttagctctgagcttcctggcagtcaaggtaaaaaggtaaatgtaccatattacttaatgtttgatctaaaaaatctgagagacaatgactttttttttttttttgaaagagttgggggtctcattctcttgctcaagccagactgcagtggtacatcatagctcactgcagccttgaactcctgggctcaagtgatcttcctgtcttcagaaatgttctccatgtgattgtttcttattctagccacactaataaaataaaataatagccaaggaatgagttaaagatatttttttttcaatttgattaatgttcattgtggaaaagctgaaaattacagagaagcataaagaaaaataattgcccataatccatctacacaaaaataataacatctaataattagcatcattcccttccagttgtcattttttactattttatgtacttgagatcatactccatgtgctcttttatgtttttttccttcagttaacattgtatcatggrtttttccccatgtcctcaaatcctccttgtaaagatgatttttggtggctgtatactattctatcctgtgggtgaaccatacgtatttaatcattcccctattgttggacctatatgttttctcatgtgttrctatcttaaatcattcaataataaacttagagaaagttcagggagccaaggagcccagtctaggggtacaactgtcagaaagaccaccctgatgccaagatccaatgtagaaatcccagtgattgktgagcatgtcttttttcttgagtggctttgcsaaatatcttttcccttattcactatgctttaaaaaggatttaaaggactgttgaattgaggctgtgcttcctaaaaaggtctgagtacagctcagcaggtgtttactgagcacctactggagctgttgatgctgcagaaaggtgtaaaacatagccccgggtttgagagaggcagctggtgaacagagaacagggcaagaacgtattcatcatttctaatgcaaggtagagaatgatagtggagatggttgcataattctgtgaatgtactaaaaaccatggaattatacactttatatatatatatawaaatcactcttttaaagtgtataagttaattaaatctcagtacagatttaactgtattaaatctcaatacagttaactaaatctcaatacaataaaatataaatttttaattttattaaaaaataaatttatttttattttatttaaaaataaaaagatagactgagtgtggtggctcatgcctgtaatctcagcattttgggggtgctgaggtgagaggattgcttgaggccaaggagttcaagaccagcctgagcaacatagggagaccctgtctctacataaaataaaaaattagcctgacatggtggtatgtgcctgtggtcccagccactagggaggttgaggcaggaggattgctagagcctaggaggtaaaggctacagtaagctgtgattgtgctgctgcactctagcctgggcaacagagcaagactctgtctcaaaaataaaacgaaataaaatttaaaaattttaaaaagaacgtgagctctttcaggttcaggtttacatcttctttgcagctgcacccccactgcccagcatgctgcctggcccttagtaagtgtgttgtttagtactcttgatgcaaatgacrgaaagccaactttaacaggttcatataactgaaaaaacctaaggtgtgctgtatgcaggcatggtcaaatccaggggctcaaatgatatctttaaaaatatcttcctctctgcctcttggctttgatttcttctgtgttggcttcactctcaggcaggctctccccatgtggtggcacagatggcctctagaagctgcaggtttacacacttccagtttagaaactccagtaagaagagtgtttctttcccaactgtttcagcgaaagtctcaagtttatatctcattggcttgaattgggtcatgtgtttatccacgaacaagtcacatgaccctgatgggacaggcctagaacttctgccctcctttcatgatgagagagggaggtgaggtcagcttcacccaaccacctgaacacagagttggggagaggtgattcctccaaggaaatcagaggccattaagggttggtatgccagtgggtctgatcacaaatagccacaaaggcaggcagttgaggagtgctaaattgaagaaagaaacaatagaagccaggggmattaagagaaagggaagatcatataggaccagagagacctcctggagaagataagcctggaagagtgaatataaagttgacagagagaggcagaggctctgggaaatggacattggataccaggaagggtctccagatcaaagatgaagcaaaaaagtgtgcagtgtgtttggaaatgcagggtttgtagagggaaaaggtagctggtgctgggcgtggacggccttgaatgctgtgtccggaaggtsggactttaatctggagctgcaaggagccgtgcgatgtctttgaacatgggtgtgatcctatcaaggctggtgagcatgtagaggctggactggagacagaatgagcctggagtcggaggggctgggaagctactttaacagttgaagggagcggtgatggggcctgaatggagacagggaggcaggagrgggtgttgtgaagaacgggcagcactgagacccgacagggcaggaggggcaacagagagggaaccaatgtctggggagggggtgtgtcattggcagaacagtcactggaattagatgcaccctagggggacaaggagagagggtccctgcaggggtgaggccacgtgctcacctcacacctgtccaataagccctggccctagggtcaggagacctgggtttgtatcctcatttgggcaccactcacctgcttggtgaccttggggaggtctgtttgcctcggtttcttcatcgatgaaatggggctgatacactaactgccttatcaggtgcataagggacaaatgagatgatccaggtgacataatccaatcaatgatcggcacactgcgagtgctcaggaaatatcgctgctctgttgttcccattgttattatttccgtacaatctggggatcattgtgctgacctcacagggctgttataaggaataagtctaatgggtggggcagctcaaagcctaaagtaaatacaaagcagtgtgacgggtcccttgttttctggtgctgtgttgcagagaaggcctgctggcagaagagggtgcagacactgtggcctttattcatgtgtgtctcccggcgtgtctttccttctgccggtatcatagttgtttgtcactttctcccctgctggctggcagctcttgagggtagggtcagtctcatccctcagggccttatggagcttaatgagcagcctgcatgagtaaatggtgaggagctgaactggaggtgcatcgattcgagtctgctttctgagttagcaccctctgggatggttggtcttgtcccttccccagggtcttcctccctcatttaaggactgaggtggcactacatatcagggctaagcaaactgctgagctgtagctgccctctgcatgtgcctaccagcaccaaaccccgagctccccaatatgagggcaatatgagcgccccagaaattcctcacacctagccaggcacccacggacataacttctctgtccccaaattcctttttaaagactgagttggggtggtgggtggaactaatacactaagggcctgtttaatgtttgatattgggctaagaatgttagcatactcactttatctttaaagggaccttctttgtgtatttgactttccttccctgtgggcagagtaacatcaacttcttcatacagaggtctgagatgtcagcagggaaattagcaagctggaagcacaagataacgatccaacaggggtactaaatggatagtatctaggatatatgtcttttgttagttagggtgggtgaggctatgctgcaytaacaaacaaatcctgaaatctcaattgcttaacacagtaagattatttattgcccacacaaagtccagtgtgtcagaggtcgtcctgggtggctctcctccaggtggtaaygcgaggagccaggccacttttgtattgtgagtctcccatcttaaggcttcaggaagatggggatagggaagaatccagagggaaggcacactggacttttaaccaccttcacttgcaagtgacacatattatttctacccatattccactggccagaaatagtcaatggccagcctaactacagaggaggctgggaaacataaggagcatatggatgccatggacacttgtcaattggggtccttcaggaaggagatgccaagatagacttgtaagcataagagatcttggaagccatccctgtgaaagataaaagaataggtagggaaatgctctgtccrtgatgctgttctgacacctgtggaaggagacggggaaggaaggagagtcgggtaggaagagctccagagccaagattatccattacakgagtttcctatcagacccaatgagccaggctctagaatccccacccaactcagtgattggctgaggtctgccttgggagattttgctcttagcttgaaggctgtggcaggtcttaaaggtgttgcagctgatgaccattagctgattgcatctcctcctgtaggttctctctttaaaggagggtggggcctacttggttggctgccacagacactgcctgtttcttctacaatgccctactacttactacacctggccctattctaggctctgggatacagagctggatgaaacacagatcctgcccttgaggagctcactgtccaacaggtgatcaagatagacaaaaacaattacacgtggyatagcccagccacaggaggggttagcagaggatgtgggggaagggaaggcattccccttctccaggcacctggttggtcatcctccatgttgtttgggagtaaaatgtaagtgacttcttatctctaacttttttgttacttattttggttttaggaaggtgaggaaattaaatggcatagtttgcccagtragcagctgcattctattactttcttttcttcttcttctctagcgttatgtaacagtgcacagtgaggctggtgaaatgccttcctgtctgtacctggctttctagggatgcacagaggagccaggctgaaaccgtgagtgtatgagccccagatagggtcagcatctgggtttggtgctgggttagttgctgagaccacagggaagtctttgctgttctctgtgaattgcagcactaatcgaggatccccactccactgttagcaccaaaagggcaggcactgggtgtgtctggctcctctgtggtccccctaggcactatctcagggccaggcacagagcaggagctcaataaatatttatcgaacaaatagatctaaaagcctggattccagctctccagttctaagaggattaatgggcagagttttaacaaatggagtaagtgctttgtatgccaagccatgtgasggtgagctttctgcttgctctttattcattctttcgggttcttattatttagtgctttygggggctctgtagttgtggtgtaaaaggggaaagggtgcttgggtgttccaatagaagatttggtgcaaagctgatgtcattttcttcgtctctgacaaatatatgcaccatcctccarggtacatcaaaacctaggaaataaatactttccggcttctgagaagcattatggttttaggaggtcagtttattggagcaatacgctaaccagtggacggaggacttaggaaacatgttctgatatctcactctcgcctccagagagcacgagagccaaaggaggctagattgggctctggtcctggcagaaattgtgggaatgaagccagttcatcagccttggtgagtcaggtggtccagtgcagatctgggcatagtgagaaaatatgttccctggaatcccctaatagcaaggcttcttccaggctccctgctcctgggtcagaagcttctgctctttattcttctrtggccaggactaactcaggaactgggtatgctcagcttgaaagggaccgtctccctgatggtgacagaataggtctggaccccaaactagataaccaagaytgtgagtaaaggctgggtgcagtggctcatgcctgtaatcccagcactttgggaggccgaagcgggtggatcacgaggtcaggagttcgagaccagcctgaccaacatggtgaaaccccgtctctactaaaaacacaaaaattagctgggtgtggtggcacgcacctgtaatcccagctactcaggaggctgaggcaggaaaatcgcttgaacctgggaggtggaggttgcagtgagctgagatcacaccactgctctccagcctgggtgacagaatgagactccatctcaaaaaaaaaaaaaagaattgtgcataaagtaagagtacattggttatgagctggagtttaagagtctgaaaattcttgcctgtgtgaatgaatattgaacacttttttgggctgatgggggcattcttttgccgattttctacctttctgatttttttagagtagtctgcattgctggaaggatgaagtgtcattgtcatctagaaaattagtggtagatccaaagtattgagtgcgtggactcatctgtcttcatcaatgcccgtgttccacagctgctggcggaagcagacccccttctcctgccatttggcaaggacatcatcagtcactgttcagataaaatctagccaaagaaggactttgtggagtgatgcattattgctgctctcatggtacagggtcaggaggtggcacagagaaaaatgatatttttcacactcttcttatgatccacttgactttgttcagagaaaactgattttgaaagcaacagccatacttataataatcatcactgtattatccaaatygtcttgtttctagaactaccattcactgaagcctttctgaaaaatgcccagagttgtttcagggatgtaagtggcagatggggaccygcatgcccactctggggcagatgaccagagcccatgcgaatgcccccgcccagtccagctgagagtgccttggctttgatggaagggagagttggcttggttgtcactccacaaagcatcctctggagcccaagtaacccttcagaggtccttcctggactctgggaattctagaaactttgggaagcccttggagagcttctaaatgtcatggtcataatcaaaggaaaaggaaataggaacatttagttgcaggtgggtagatgaagaaaaagaaactagaacaacagtagctcacctttatccagtgcttactatatgtcggcacctatgtcagtgctttgcagcattcattcatttcgtcttcactacagtcctatgargtccttactctttttttttttttttgagacggagtgtcgctctgtcgcccaggctggagtgcagtggcgccatctccgctcactgcaaactccgcctcccgtgttcacgccattctcctgcctccgcctcccgagtagctgggactacaggcgcccgccaccacgcccggctaattttttgtagttttagtagagacgaggtttcaccgtgttagccaggatggtctccatctcctgacctcgtgatctgcttgcctcggcctcccaaagtgctaggattacaggcgtaagccaccgcgcccggcggtccttgctcttattgtctgcattttacagatgaggcttagagagcttatgtgacgtatttaacatcacaaccaaccaagtgtcgagctgggatttgaagtctggatggtctgactttgatctctgcagcttacgctctgagtaaaccaccatcttcatatagttattttcctcccataaaagcaagcggcaagttttttttctccgataaaaacaagcggcaatgctttttttgcttgcaaatttcacccccaactgcttgcctctccctcggattcaaccccaccctctcccatttctctgtccacccactcagtcatatacagccaaccctgcactttctactcactttaaatgtctgtccacacacctgactcacacagatctgctctctatcccctggcacctggagaacttgtcgcttgcagaacttgtcaccttcggttgtgtttactcaggatggcagtgtttatgtctgagtgtgtctcctratagactcggatcatctcaagggtaatagtggtgcttcctttatgaatttaggctatacttgctaagcacctacttggtgccaggctctgggtttgttacacagtgtagggagataactccaaaatagctgtgctttcaaaggcacgtgggggaggaggcccagggatcgttaccatgcagcatgaggagtgtgatggtgtggatgggcacccccaggtacagaagacaattaagaccactgacccagcaaaccagtccagcggcctcccagcttgataccctgcagggactcaccattgttcttggggtgggaacacagcttctcccacagctttgcaagccctctggagtctgccctgcccactcccagcattgctgctgagcactctccctctcttcttcaggcccagccacatggtcctctctgtgtcttggatgagtgtgctcctccctgcacagggcctttgcacaagctgttactgtggcctggaatgttcttgccacctttcttcatcttttaaatcctagatcaagtgtgcattctctgtcctccccgattaggcaaaatccactatcacgttttctctaagaaccatgaactttcctttctactgcttatcacagccgcaagttaacttttgttggattatttgatccctattggtctccctcctgcttcacaaggggactgtgaactccatgagtgcaagaactggtttgttttggctcaccataatgtccagcacactttctagcacatagtaggtgctcagtaactatttggagactgagtgaaggctggaggattctgaggccaatcttgatgtttataaatggcatgctagtttgtttttcagtgcctgtggggtgtgggggagacagctggacactgtagaaagacactgggcatcggtcaacctgtgtgtgcatgctgacactgcctgtcccctgagccccagagtccttgtccgtgagatggggatgatactctgtgagagagttattttgagggttgacctggaacattcrtgtaaagcattgagcacagggatccacactgactagattttatactaagttttactgttatcattttattataatgcatatgaaaatgtgaaatgctgtgtagcagcataaaaactcgttcttatttcagtgggggactgtgtgtttgaggccaatgaagaagttgtgatctgtgtctgagcttcactgaatgggatttttaagttaaggggtgtttttaagccccatccatttctggaaggatttgaggtgcgctgagagctcagtggtgaaccatccactggcccttggggctggtgtctccagtgaagtctttataactctgctttataatcactactggttattgttcactgccccgccaggctatgagctgggccagtccatgaggacaggcacagcatctgtttggtgtctgccatgccccaaagcccaggacagagcctgcaggtactccagaatatttgtgagtgaatgaaggtctctgtgtctggagcacccagcacagcccctggtgcmttgcaaatgtgtttcgcatgagtgatgctaaacacaaggtaaaacagaacaattttggataaaaatcagaactgggcccctaagtggaacagagaagatgttatcaggcatctgtgaggaatggattgttccagttgaacactggatttgaaggcaagagagagatgctctgatgttcctgtgtgatgaggacacatttccttttaggctccagagacaaatcttttaggttagaggcagggcagttcagtggaaagagctctggattctacatgggtgacccaatgctgatgctctctaatggatgaccttgagctagtcatttaacttctctgcaccttagttttatcacctataaaatgagaatagtaatgtctgctctgctttttcatagagttattatagagatcggagaaagagagagaggaagggagagaaataagattaatgtgaaagggctttaagaagctgtaaagtggtgcagatataaaatacgcccgaaactaaacacaaagagtaattaattctgggccattctctcaggaccattggatatttccaataacatctttatagaagacatagcgatgtcattcatgtgagtgatcatttaaccccctaataaaggaggacacagtattagattataacactctgaaagcagttcttcagggaactgaggttctgtgaccctagcaggctgtcttaccgaagaatctagaacaagaggtagttaacgtgtttcctctcaactgtcaaatgtcttcaaaaaccaatcatctgtctttggcaggtgtcaggcccaaggccatccactgccaggctattgatcaggggtctcagggcagaaacttgggagcatgaaagttagtgagggctgtcttctgtaagcatcaatttgggatcctggccatcagcggggcctagacctcaaatcatggggggttgctagttgggtggctgggggagagcctagcccaccagcttaaaatatgaaatacccagactgggccagtccactgcagcccaggagtgggcggctggaatgcctgtgtgctgggcgttttcattttctccagaaagagctttgacttctccaaggagatatacaagtatttggtggagatctcagggttctgggccaggcagtgtggaaatgatgaatctggcttgagagtttgggggcaacagttgctagctggctacctcctcctcaaaaggagagcagccaggctcctktggacactgggtttttaaccatcagatgggctttgacctggctgctcagaattctctgcatgctgtggcctggaaggccctaattccaaccttgtgtccacaatggagaaaacaaaatgacagggacaggtccttattgaatccctactatgtgctgggcactgcatggctgctttcatatgtgcacctggatagtggcaaggtgtagtagaaagagcttaaaacttgtgagatggagaggcccagggtcagctctgagctctggtctggctccgtattcagatgacattctaaagcccctccccttaggaagctttcaagtcattgaggatcaatggccatgttgtctaaagaacagtgggtcctctgggagggaaaggaatgagagtgactcccagcctctggggttgaaactgttaggatgtagtggggcctgctggcaggaaaggcaaaatgatctgcaagggagaccttgctttgagtgggggccagagcatgggctgctgagggcaaggctagtttagagatatagctgatactggagccccctgctaccacctgaggacatggaggggcccgggaatggcatctgtgtagatcagtgcacatggaaactgctcaatgcccgggactgaaaccctcactttctgttttggccctgagtgggtggccctggagaatgggggcctctgtcccaagattgacctcatcagggggcaggacctcatcctggtttcagaggagacctcaggcttctgatgaggccatggtagcaaggcagagctgaagggagctgagggtggcagctaagcctggcttagaggctgggattgaggaacctcgaggtgtccgggtgaggaacactcgctgatctatcaacataggccacgccgggggtcgagggagaactgggccaagtattgccaagagaaagcccagactgccctacccccatctcttctttgagcattccaaggaatatgtcatttgtatcgacccggttaagtctgaagggcagttggtgtctcatttagttcttataaaatggttcctctgttaccagggtgttactgaatgaggcatttggaagaaatagtcaactctagcactgcacagcatttgtaattctcattgtttagttgttggtattattttaacaactaaacaactaaagaagaattcttgcccttagtcccattcatacctggagaaactgtggatctgcatggtgagctggggtgtgaggcagcgagtctaagttggcccgactctgagcccagtgcccttggcaccacccacagcggccaggcatgctacagtccagccagatggggtctgtggtcctgctgtttggggtcccaggatccagccagactcccgggagtcacctatcatggctgttcccgaaggcccttaggccaagccccggagagagtagaaggttatagatggtgagctgtatgtgtagacactgttggcttcatggacgagaatgcactttctatttcatcctcctaagcacttcaagaaagactaaaggtggcccagggaggcgctcagagtggctggatgttgggtggactaatatccatactgctggccaccacagcttgccacacaggggaggtgacctcatgctggacactgagttccattcaggagcaagcttggagcacctgcctcctgccacgccctgggccatccaaacttgactcgggtgtgacctctgcccttagggagctcacaggacaatgtaggccactcacatgcaagcaagtgaccctggtaagagcacttactagctgtgttagttttgggcaagccactttatctccctgtgcctcagtgttcttctctgtacaatggggtgataataatagtacctgcttcayaggacggctaccaaaactgatagttatcagtgactgctgaagacttcagccactgcctgatacatagtaagtgtcataatagtgtcaaatacaaaaatgctgtgagggagatttgaagatcctcttagcagaggctccagtaagaactccagcagcacaaagaggaggtggtgaattgaattctcacagggtggaacctggaagggcctttcactgcaagcaacctttgagctggccttgaaggacaggaggtagaagatgtgggaagtaccctgtgggaggagggaattgtgcaagcaaagcttggaaggtaggactttgaggggataatgctgagccattcagatgtggccagcacataggtgactgaccrcaagagacactgtggacagagagctgaacggcctgggaaacagtcacctttgggcccgcagtgtctgaaagcacatttcttaatcaatcagtgctcaccaagggcctccgcaaagtcctggcttctagccttgctgtcggcaaagagtttcctattggccaaggctggagaacacaaccccccagtcaacggagagctgggcaaggtcacctccagggacattgcaaagactaggacacagggcaagaaaggtggattaggctgacttggagttaaaccctggctttgtcacttcctaggggtgacaagccctgtaactcatcgagcctgtcattccccctgtgcaacagggagatgagtttacctgccttgcagggtttgtccgtgaggctaggatgagagtatgtattctcaaacaccccagctggagctaggcactccacggatgcctgataacactgaatgggaatgggacccatccttgtttgacatcacttagatttgggagtgagtctgccctcagatcattctaattttaacaatcaaaaaatgactcasggtcttgaagagggcccaggagggattttaaagcttactctaagttgagtctgtaggtggacataatagatgcaatcaactttatgtttctcttaatggctttcttgatgaagggaagcagtgagtagcagtgatctgtgctgatataactgttgtggaactcagcagtgagaggccaggttggcaggcctggctgtgcagtcacagggcagaaggctggtgctgacttccccaggctgtccctctggctgatgggcagccagtctggctgcagaggaagttgcccttttgatgcaggtgcacacacagttggtccctaggacctgtctctctcagagtgtggcagggtatctggtctgggttgggtttctcctttattccctgatgggctaagtcctgggtttggacagcagcactccgggggccactgtcattctggattctagggattaatcagccyctcttgagaggatcatggtcttggttcccagctgagatgcagaatggctttccttctgagacctgccaggttccagccccttgctacctgccaaacatgacttcttctttgggcagagaagggcgggctattccttctctacacatttggatgaaagagattctgaacagagcaatacagtggttttctcacaatcactgataaagaagctgatgtataaagatgaaattggatttataccaaaaataaatcagttttaggtgtttagcaaaagagagctgtaatggctttgggggagycctggggaaaggaaggatgtgttcagaatacggggttggatcttggaaggcttggtcctggttcctgaaatttgggttctctgagactcagtttcttcacctgtaaaatggggaaaggcacctgctccaacctctctcagggtgattttatgcttaaattagataatgacactggraagtccttgaccaaagttaagaaaggcatatctgggattgctgagtgtttccatgagagccctgctgtgataggtgtctgaacgtgtgaaggaggaaatcatggaagctgcagaagaagcagtgttgcaacgataatggggactaaagtaggtctcatttcagttttaggaggaaatagggcagtagatggaaagattgagctatctatttttgtttttaagtcactttgcagggaagaaattgggcagttggactctttcattctctatagtcagaagtcagaagtcagaatgtcagagtagatttaaggcccacatgaaaaaacagataaatatatcctgaaaagagtttcttgtgtggtttggatgtgtataagaaaccaatttaaaagcgttcagatctttgtatggtatatgtaatgataactgacataatagcgttaggaagaacataaccgtgccataaaccctgtcattttgactcttttgaagaaaagctggtcagagacgtcggggatagaggacgatcctggcttttttacttgctgcaaaagctgctttctgcagtccagctcctcttgtttggagctgtacaagatccttcagaaacctggaatgtgggaatcctgggttattgtctacatgcactaggcacaggcatgagcttgtctaagtgaaaatgcagtatatcctactattagcaccgccagcattgtcaaagcaaacacattccccagtcttagcctcttctaaggactttataggtagtaaatcatctacttctcaccaaggtcctaggaggtaagcattgttattgcccccatttttcagatgagaaaactgaggcacagagagtttcaataacctgcctaaagttacatgtctagtaagctgggattcaaactgaggcagtctggttccagggcccacatccctaaacgttatacacmactgtcttgtgtctggcttccaaagggacctcaagaaatcaactggtgcagttacctgccttcccatagataatctgatcattatctctattttacacatgagaaaactgaggcccagagaaggagagaggcttgacttgctaaagccatacaataggatggcatagggctgggactagaaccggagtcttcatgatagtggtgacctcctccagaagtttgcccttgcctttggcttatctgtcctgaacgtgctttccttttctgagacagttgggcaacatcaatatctggctcagatcgggctctttcttatctccatcacgctttgcactctcctgttctagaaccagcagatgctccttgtgttgcctggctcacctggccaggacccttccctggaacgcccctcccagctgtccacagaggcctgcacaagtgtgatatggaggttagtgggaactataactagctatgattccaatgtggatgctcagagggtgctttgaacaattaagagaggaagtgatgatcactggggtcaccctgggttcatttagagcaaggccttcaggactgaccactctttctttgttgagaaaattactaggctgattagatcagggagctaggtcctagcaaatgtgaattctttgaagatatttgacaaaatctaatgatttttcaatgagataaagatggtctatttaggcacatctgttaattgttgaaactccaaacccaaaagatattcatctgcaagtaatctgtggtggttgtccatgggactctgttctttgcctggagattttatatatatatatatatatgaaaccacatattatttcttaaattagtgatttggataggtcataaaagtcatactgatcaaattttgctgatgatgccgagataggaggattagcaaatatttgaggtggcagagccaaaaaacaaatttcctgttgttacattcaccccattgctccaggattccaagattcttttttcaggattcactgcatcattggacacttggtttcaaaaaaccaactgcttaaggacaagacaaagtcaatgagccttagagggagtagrtgtgaaaagaggcagaggctcttgttgactgtgactcattatgatctctggagggcaggggagctgaggtctgctgctcagtgtgtgtgttcctgtaaattcagactaccctggcaggctggagcccccaggtctgctgagaaggggtgtcctttggggcatgtgctggggaaggtgatcccagtgagaccatcgaacatgcccagagatgagagaaaacacttccattggtggctttggattcatcttagatccctccccttcaccctccttcctacagatgtttattacaagacctctgtgtgccaggcactgtgttgggcattggtaggtggtcccaagcattgcccctgtcctgtggagccagtaagctttctacattgtgtgtgggtggtgccaaggacctgtggaatggtgccagaccgggttgtrggaaatccagtcattgcaaggtgggcagcctcagagtcaggagctggagaacacagcgggggctgggggatggggtagcagatcccagagcaggcaggaaacagcagatcccagagcaggcctctggcctcaacagagtctctccttgaccaaactttagtcaggctcctctgatcctcttctcaaccaggccctgacctttgggcttctgtgtccatctttgcatcacccaattttagcaagaatcctgctaagtcagtggagtgagaattccccaccctgaatatctgatcacccctgatatctgatcaaattcctcgtccttcacaagcctcaggtgatgtctgatctccctggcctgacttcagcaagaatcctgtccggttggttcagcmagaattcccccttacacctgacatttcctcatagtaatgttccgtccgtgacctcccaccctgccmcttggctgtaaatccccacatgcccttattctgcttggaactgagcccatgtctagactgaggtctcttgcccccagttgcartaacatcctgaataaaatttgttttcactgctttaactagtgtctagatctggcttctttgacagccctcagcaggagagggccaagaggacaaggaagtctgtgggttgaggcagggcaggaaacctggttaaagtgcaggggaaggtcagagtatgtcgagggaggatctttgtcttgtttgtttagaagcactgactctgctgagggagggtggtctgggctctgctggaagtacagggctggggagaggcagagcttggagggctgttgtggacacccttgtgtttggttgatgggttgtgggggtgacagggaggaagcaaggagccaaagctctgtggatggtggacccttcactgactgagctgggagtcctggacaaggggcagggtttgtggctgttaaagaaaaccggagccagacagaagttaaaaaggtaaaaatagattttaggcccagtgcagtggctcaggcctgtaatcccagcactttgggaggccgagatgggtgaaccactggaggtcaggagtttgagaccagcatggccaacatggtgaaaccccatctctaccaaaaatacaaaatttagctgggtgtggtggtgcatgcctataatcccagctactcgagaggctgaggcaggagaatcacttgaactgggaggcgaaggttgcagtgagccaagatcaccccactgcattctagcctgggtgacagagaaagactccatctcaaaaacaaaacaaaacaaaaaaaacagattttattcggggactattgcaatagaggaaaagagaccccagtgcagatagaactgggctcagttccaaatacagcgtggaccagtggcgagccataccccaagagcaggttgggagggatgggaaattattatgaggaaatgtcaggggtaagggacgattctggctgaaccaactagacagggttcttggtgaaggcaggccagctggggagatatcagacatcacctggagctggcgggggatgaggatttgatcagatatcaagggtgaaggtttctagctaagacagcttcacacgggtcttggtaaaattggatgatgcaaagacatggaakcccaaaggtcaaggcctagttgggaagaggatcagaggagcctgactaaagtttagtcaaggctaggtgcagtggctcatacctgtaatcccgatactttgtgaggccaaggcgggaggattgcttgaggccaggagtttgagaacagcttgagcaacagagtgagagctcatctcttaaaaaaaaattagctggggatgatggtgtgtgtgtgtgtagtcccagctacttgggaggctgacgtaggaggatstcttgagattgggactttgagagtacagtaagctatgatggtgccattgcactccagcctgggcaacagagtgagatcctgtctttaaaaataaaataagtaaaatcaaaaactrtagtttaatcaaggagacactgtttgtcatgggacgaagagatccaagaatgcagaaacagaagacctgcccatttggagctgatawtctagtggggagatagacatctgaaagaaataattcataatttaaatcagaaggtgtgcactgagggcttgaagcatcattcatgcccttattcattcaacaagtatattagaattctctagggaactctagagggttcaggactaataggatagatgtatatatgaaggggggtttattaaggactattgactcacatgatcacaaggtgaagtcccacaataggccgtctgcaagctgaggagcaaggaagctagtctgtgtccccaaacctcaaaagtagggaaaccaacagtgcagctttcagtctgtggccgaaggcctgagagcccctgccaaaccactggtgtagttcccaaagtccaaaagctgaaaaacttgggagtctgatgttctagggcaggaatcatccggcacgggagacagatggaggccagaagactcagccagtctagtccttccattttcctctgcctgcttttatcccagctgtgctggcagctgattagatggtgcccacccagattgagggtggatctgcatctcctagttcactgactcaaatgttaatctcctttggcaacaccctcacagacacacccaggaatgatactttgcatcctttaatccaatcaagttgacactcaatattaaccatcacatcaatgcctcattctaccttgatcagggcagttttgggaggaggtggtgatgcagcagctggccttgaggaaagcccagaattccatccttgaggcagggaattcaagcagagtccattgcgctgacgaaatacagatccgtaataagagaagctttggacggggtaaagtttgtctctaccatagatgttgctttcactctgcttttgggaaatgttacagtagagtatcacacaatatttggttttgatgttttaggatagatacattatcttggaatcacaagccccctttccagaatataccaaggaattgatagatatcattgggtatcatgagcagtttcggttggactttggattatagccaatatcatgccaatggaatccgtcaccactgatggttggacctttcccagctgggaagggaaatgcatacttacaaggacatttgcatcttctgaaaaatcatcctaacaataaactcctattttcatatttggagagtttgcattttaaaaaagataactagtagtgtttttatcttattatagaagtaatttatgttttttgtagaaaatttggaaaatgcaaataaagagaggaaaattcaaatcacttataacctgactatctaacacaatcactgttgataccatggtgatttcatcagacttaaaaaaaatagacttcagatcatctgctgctgttacttgagtcccaccccccacaaccaattttttttttttttttttttttttttttttttaccgkggtaaaatgcattcttcttttttccttttactgkatatcttgaagagctttctggctctgccagagtctctacttcatatttttaagtggcttcccaaaattccactaggccataatttatttagatttttttttttttttttttttgagatkgagtctcgctctgtcgcccaggctggagtkcagtggcgagatcttggctcactgcaagctccgcctcctgggttcatgtcattctcctgcctcagcctcccgagtagctgggactacaggcgcccgccaccatgcccagctaattttttgtagttttagtagagacgggtttcaccgtgttagccagcatggtctcaatctcctgaccttgtgatccgcccatctcggcctcccaaagtgctaggattacaggcgtgagccaccgcacccggcctggattaattttctgttgtcgaacatgcaggttgtttctagttgttggktttttttttctcttctaaacaagggtgccgcattcagcccggaaacaaaatagatgcgcatctccatgattagtttcttagaatctagcattggctgggccagaggggatgcaaaatttaagtattttaacacgtagtcatctcggacatttgtagagagcttactatgggcttttacatgcatgatctcgtttaattttcatagcgtaggtaggagctgttattattcctccttcaagataaaacatcagaggctcagagaagtttagtaacttgggccgggcgcaatggctcacagctgtaatcccagcactttgggaggccgaggtgggcagatcatttgaggtcaggagtttgagaccagcctgaccagcctgaccaacatggtgaaacccggtctctactaaaaatagaaaaattagctggacatggcggcccatgcctgtaatctcaggtacttgggaggttgagacaggagaatcgattgaatctgggaggtggaggtttcagtgagctgagatcgcgccattgcactctagcctaggcgatagagcaagactccgtctcgggggaggtggaggggggaaagagagaggtttagtaacttccccaagacctcagagctgggcagtggcatagaggggatgaagccccctgagcccaccgcaggacctgcactggaatctgacactgtacttcctgccaagctgtccttggacagcagtgggtgtgtagaccctttcccagagcacaggactgagaattatttctgaaacaaacaaacaaaacaaaatcaaaagctctgtcaattgggcagttgataaactttcactttgcatttctttgtttatcagaaaggttgaatgtatttaaatgtttaatgagcctttcatttttagtgaattgacttgtatctcttgcttattttttaaaatatgagtagctctttcttgctgatttgtgaaactgctttatgtattaagattggtaaaatcaggccaggtgcagtggtggctcacgcctgttatcccagcactttgggaggctgaggtgggtggatcacctgaggtcaggagttcaagaccagcctcttcaacatggcaaaaccatgtctctactaaaaatataaaaattagctgggcgtggtggctggcgcctgtagtcccagctacttgggaggctgaggcacgagaattgcttgaatccaggaggcagaagttgcagtgagctgtgatcatgccactgtagtctagcctgggccacaaagcaaaactctatctcaaaaaaaaaaaaaaaaaaaaaaaaaaagatggtaaaatccatctcctatctcgtgtgtggtaaatattttttcctgttttttcacttgcctttaattttacattatttttcaatatacggttttttgtttgttttgggtttttttttgttttgttttttttttctgagatgaagtcttatcctgtcttgcccaggctggagtgcagtggcgcaatctcagcttattgcagcctccacctcccgggttcaagtgattctcctgcctcagccttccgagtagctgggactacaggtgcgggccaccatgcctggctgatttttagtagagatgagttttcgccatattggccaggctggtcttgaactcctgaagtcaagtgatccgcctgtctccaccccccaaagtgggattacaaagtgctgggattacaggcataagccatcgcatctggcccaatgtaggggttttaaacatcttcacatagctggatttatatctttgtggtttctgcttttggtgtcatgcttagaaagtcctgcaartactccatggctttataaataacccacttatatctccttttggttacagtaatggtttgatttttaaatatttaactctttttttttattgttttcttgaatttatttgatcaaaaagaggaattggtgacataaggagatggaaaaatatgagctgattttataaaaaataatttttaggttgtaattattcatttagttgtcatggtaaaatattttatagtagtcttaattatgtcttcacaaatatytttttaattttttttttattatactttaagttttagggtacatgtgcacattgtgcaggttagttacatatgtatacatgtgccatgctggtacgctgcaccaactcgtcatctagcattagttatatctcccaatgctatccctccccctccccccaccccaccacagtccccagagtgtgatattccccttcctgtgtccatgtgatctcattgttcaattcccacctatgagtgagaatatgcggtgtttggttgtttgttcttgcgatagtttactgagaatgatgatttccaatttcatccatgtccctacaaaggacatgaactcatcattttttatggctgcatagtattccatggtgtatatgtgccacattttcttaatccagtctatcgttgttggacatttgggttggttccaagtctttgctattgtgaataatgccgcaataaacatacgtgtgcatgtgtctttatagcagcatgatttatagtcctttgggtatatacccagtaatgggatggctgggtcaaatggtatttctagttctagatccctgaggagtcgccacactgacttccacaatggttgaactagtttacagtcccaccaacagtaatatttaactctttactatgttaatctattttttataaagtaaacttctaatgatacatatttctccaaatggttaatccagtgctccaataccatttgttgaatgactcatttctctgcttacttgaaatgacacattatayatagttagtctgtttctgaacttctattccataggtatgtctgatgctttctgggtcagtgtcccggtatttaagtcaccttacgtttatattatactttaatatctcataagggaagtctcctccatgatgaaccttctctttgcaaggattgtcttaactgttctcacctgtttattcttatgctagaactttagaaccattttgttgagttctaaaaataataatagaggccgggcatggtggctcatgcctgtaatcctagcactttgggaggccgaggtgggcggatcatgaggtcaggagatcgagaccatcatggctaacactgtgaaaccccgtctctactaaaaaaatacaaagaaaattagccgggcatagtggcgggcgcctgtagtcccagctactcgtgaggctgaggcaggaaaatggcgtgaacctgggaggcggagcttgcagtgagccgagatcgtgccactgcactccagcctggatgacagagcgagactctgtctcaaaaaaataaataaataaataaataaaatgataataatagaattagtattttggttggaatttggtgaacttagaaattgattaaaggagaataattttttttttgcagtattgagtcttcacattcagaagtaaggtacatcttttcttttattcttacctgtttcatatgcctctggaagaaaatcgtagttgttcatttgtaggacaagaaaagatgttttttccctcactcattgctaggttcatggcttaggcccctataacaaaagatagattaaagagaaaagaggaaatatacaaaggtatttaatataagttttacatgacacaggagccttcataaggaaacaaaggcccaaagatgcaggtaaacttgtgtatttttatgcttaggtttgatgaaaaagtggatagttgtggagatagttgattggacaaagagagtgtgatctaatggtaataaactgggaggaatttgccaaggcctgtttgttcagattcccctctgtgctcctgtgtcttcagagataaggatgttcctttccccttggtatacagagggcacctctccatgagggtcttctgacttgcttcaagagaaaagggcgggagaagctcaaagagtgacttccctaggttttatgacctgctccaggggagaagggtgtgaggaaggtgagaatggccttcctggtactgctgttttctcaaatgccaaggtgccagatttggggatagtgtgtcctgaaggctatcccatccattcaacaaatattcttgagcagctccaatcattacagcccttttcatagaaattctacttgtttcattaagttaattactcagtgttttaatctttgtcactattgtgagtgatattcttttgctattatagtggcttctcttctccacaggtattttctaattaactattgctggtgtggagaaaacttggatttgtgaatatcactttcctagtcagctgccttatagagcattctcattggtcctgtggtttctcacaggtttccttgagtttttccaggaagacagtcatattgtatgcaagtagcaatacttctgccttgtcctttccaatattttaatcttgcctctttgtccatggattgaattgtcgtcatctttggggactggactgggcagaagtcatgagcatccacattcttgtctacatcctgagtttgatggaatgattgctgtttgcctactgcttggggtactggctatttgcagcagactttgtcatgtcctggaggtatcctctttcccatttgctaagagggctttgttcaaaatcagaaatgagggctgaattttattaaatgctttttcagcctcttccatacaaatgatttgcatttcagaattatttctgcaggcaggtggaccataaacaccttgaagtcaagaactgtccttaagaccatcatagacagtcattcattcccaactgtatagaaaccttacatagaaacaaccataggaaattatcagtcttccctgcagtaggtactcagtcaacatgtattggagcccatgggtgcaggctcagtcactggcatgaattttaggaggatgtgaaagagaaagcactctgaaaatttggaggtgggatggctggggagcttcacctccccgtatgcactaattaggaggccataaatgtgaggagacatttcatttcatcccgttttccagatgaggttagtatcatgtttgcctcaactaggaactgaattacaatgccatagacatttaaattgcgggacataaagtgcttgtcaagtgctaattacagccttgctggtctcctgtattaccaacctcaagattctgccagctgccagcaggggcaggctttccagcgaagcacctcgcaggaaaggtgccaccgcgttggggcgcattctatatgtttgggaaattagacttgctttctaagtaaataagcggttagggtgccagtggttagagctggcagtggttggtagtgtccccaggatagttctagttgttttggctgaaaacaaattgttctaaagcaggatgaaaacaatatgatcaaggtgaaaattaggtccaaaataatgagttggcaaaaagaaaaatcagtactccccagtactggatttccatgtattggtaattctggtgcactcttcatttagtcaacaaatattaaccatttattataggttgtagacagtgggggttgagggagggtacatcaatgaacaaaacgagagttccgtccagagarcttgcrtgctgataaaggagacagacaatgcaaaaataaatacatcttagatagctagctaggtaggtaacatgttaagtggtgatggcactaggaaaaaaaacaaaaacaaaggacagtcaggccctaatatttacgggtgagtgatttctgtttgaaactggtgtccagagaaggcctctctgagatggtgctggagcagagattggatgggaggagagagagagagccctgtgaaggtcgaggctggagggagagccactgcaggccctgaggctagtgtacttgaggagtttgagaacaataagagggcccgtaggactggagcagagtgatggagtggggcagggtcaagtgtgagrcagagaagggatgatcccatagggatttctggccatgggacatttgaggactttgagcagggaaatgacatgatttgacttatctaagggccattttccaaactctgctcttaggtatttttggttcatttctcaaaagttttttggcagagcaggcacaattggctgaaaatgaacaagatctaaagagagaatacatagccaataaccaccatgaggaccagaaaaaaaattctgaaaaatcagcaaaactgcttgaatgcctataagatgttgtaaacctgtctcaggtatcctccagttattaatatgtgaaaagccaatgaccagggctcttcgcttttgacttgattgctgtctggatcaagccttcagctgtctgggggctggccagtgtgcagtttgccagacacctccctttggtcaagagcctgggtctggaggcgtgcaagtggcccagacctatcttcttgagctgaaaataactgctgcagatggtaagacttgggcaacggtagtgcagttgggctccaaatagtgcagtagtcttcttggctatgtgaaaagattatttcatctttagtgctaccactgttgttttatgggccwgtaaggcaggggaagttgaggctgagggcatagcttgagtggatggccatctgaggtcccaggtcccaatctggaattctttcagttgcatcacaagagacttctgtgcccacagagcaccttgcccatctctgtatcaaagcattcatcctataatagtgtaaagatctgtttctgtgtttgtccagctaaattgggacttcctttagtcagtatgtttgggttacatgtaagctgctgtaaaaaagaggctcaaaaatacagcggcttcagtaagttgaacacttatttctccctcagtcaacattatggctggtccagacatctctgctccacaaggtcattcagggatctgagttccttaactcttgttgtcccatcgtgctataggatttgccctcattgaagtagttgcaatagggtccctgccacatttgtgttttagctcaccagaaggggaaaagagggaaaaaaattgcagaaatccagagcaagcaacttgtcctaaagctgaagatggcctagaagttgtacatgtcacttcttttcaatcccatttcagaaatttgtcacatagtcatacctagctgcaaaggaagctggttacatttaatctctagctagataatggtgtggcatattagttttctattggtgctataaaaatttaccacaaacttatagcttaaaactacacaaatttattatcttatagttctggaggtctggagtccaaaatgagtcttgctaaggtcaaaagcttgtcaggactgattccttctggaggctctgaagggagaattcatttccttgcttttttcaacttctcgaggtcacctgcattccttggcacatggccccttccttgcatcactcaagcttcttgattctgttgtcacatctcttgctattcactctgatttctagcctcccacgtataagaacccttgtgattacatcaaacctatctgggtctaggataatctccccatctcaaaattcttagtcacatatgcagagtcccttttgccatgcaaggtaacatatccacaggtttctggcattaggacatggatatatttgggggggtgtgctttgttctatctattacaggtgagaagaggttttattactaaaagaaggaaagggagaaaggatgtcagaggagtgtcttcttaatgcctgccacacagatgctctggaaatgttgaatacagcaacatttggtggagtattgcctgccttcctccataccaccctgaacttcattggttcaaccaatatctctttatacaaagcaaaaggtggcggatatccagtgctgatctttaagtgcatagactctcaatctggggcaagggaaatgaagaggaggcccctagtgcagattagctgtccacacttgttactgttaatttcacatccttcctggattccactcacccactcccaccttcagaatagacacatagccctacacagctaaaactgagcccattatctgaggctgcaaatgtggcttgttctcctagttttccagaactgtcctcatgctgatcacacaagctgagggctttggcgtcatctctaaccactccttttccttggccctcccctgtgtccgctgactcccttcatgtttccagatctcatggtgttcactcctagcctttcttcatagcctcactgctcatggaactggcccaggacttgtcactgtggttagggcacctgccacagccgttcacctggcctgccttcctctggttcctcctccttcaagcctcttccatccatggyggctcctgctttggccactgaccaaagcaccattgccatcctgccgtgcttgctgggaagtcaccacttggttcccacttcatggcaggtgaaaacatatctgcgttcactctccatgtgtttgacctggtgtgggaactagaaaaggcccttccctctgagtcagagctcccaggttccatcctcttccctagaccctctaagaggcctggggaagacacatgcttcctgtgaacctcagtttccagcttcgtgagaagggagagcctggccagctgaactttcactttaagatttggggattccttccaaactagtccttgggactcctgccactgaagcctagggaggcagaaagagaagagggtgtagagagaaatgaagcttccacactgtcccctccacaatgcccctgtggatggctcacatgcacagcctcttccatggccttgaaccctccagtctcagggtctcccttatcctccttgagccctgttcatagcaggagtactgacatctcttcagctctgagacccagctargggctggcagtttggccccaccatgctgggccgccaccttgtagcctctcttcttgtctcatctgtcatggactctcctgtgtgggcatctcacctctttcatccatcacacccragtcctgtactgtaggtgtgtgagatccaggtgccgccctgccctctgctacactggactcctgcagtgcctggaacacaaaaggtcctgcggtggggatttttttcttacctatttctgcctcttcccccactctcaaccctcactgcccacccaggcacccagcactcagggcccctagaccaggagccagcactttgaagtgaaaatggacaaggtgaaggatcctatggcacccccagatgttcacgtggcattcctggctttcgtgattgggtgggatctgtttgttcagagtaatgttgatgacaccactgcgattcctgggctgtgtggatggatttagtgaagtcacttgtaagaacaagcaactggacatgggaatcctgtggaagcttggatttccatgtcatttarctactctatcttagrctccttttgtgttccaggcaccatcctgggcagtggagtggagaactgccaagggaagtttataaaaaccccctgttccctctctagatgatgatggagacagaaatgaccacacagcctgaactgtgcaaggctggaggagggagtctctaactgttaagcaaagtttataaaccatttctccttccctagaggattgatgtggggtatgtggacaggatttgcagtgactgatgggcctcaaacgaggctttgcccttaaaaaaaaccattatcatttatctcstcctcaacagggctcctcatgaccttcagaggcagcagctgaagtattagcagtgagcgtaggtcagacaagggcttgtgtgtcgaacagtgctttataggaaaaccacagtgatagtggcaattatgcaaggctttccatgctccgttatgccccgtttattcaggatctttagggcatcaattgtactcgggtgcttattttcagggacctaaagttttcacatttaaacaccaaaagtgttttcttttagatattggccatcctgtgtatctttctaaaatctttttattccctgtttttttttttcaacttagaaaacgttttctcgtacatattcatggtagaagaaaaaccaagaaaatacttataaagtataataattttctcccttcatctactcctctcagagataagtcctgttcacattccaccttctaagatacggtgattttaattcagtcttttattgatgactcaagatcttcatctcagtcctcattagttgtcctctgcacatgtagcattttccccaccatgcactatgattcttggtataaaaagtgctgcacgaggcgattatctatttggctattttattttcttggtgccagctggcactttctgtggctgtacataaaccttatattccttttgcctctctatatgcaccgggtcttcttgattctaagatgcacatcttccctggatattttaatgtttctgaaaccaggatgtaccttgccagaggacaaaggaataagttcttgtggacattgtcaccatctccgtgtacatggggtttcatctatttcccacctcagttgctatggtcacttatttcattggagactttacagtcacttgaattttaacttacatttggattcctaaatgattggttattatgtgttttagaagatgacactataatgaagtaatacaattattgtgaatgtagaagattgctgtcatgtgccagccaagatgattaaaggcagttgaaattgccaaatctcccagaatagatcataaaattttcagagttaagggaggtggccgtgaccaacttttgtgtcatgaaggaatatcaagtgcccgaaattattaaaagctttggacagactttaaagataaactgtctagttcccatcagcagataatttaattaaagaaaagtgaaacagcaaataaccaaataggaaattcagatgaaaggcccttatctcctttatccttgggtttgcctgagaattgttctgttcatttgaaagatgctgaggggttcaaggtcttgcagtctgggtcacaaacagcagggcttcagcagaatgctgtgcccatctggccaagacaggcaccgactcagacgaaccctgagaatctgcatctgaagaaggcttagattcaaactttgagtgtagtattgaagaagaaagtggtttgaataaacctatgctttttgctggtcagtaaaaaatatttctgtgttctcacttaaaagggaagttgtgacacatgctacaacatggatgaaccttgaggatatcatgctaagtgaaatgagccagttacaaaaagacaaatactgtctgacttcacttatatgagatttcctgagtagtcacattcacagagacgggaagtggaatggtggtcgccagggctgggggagaggggaaatagggagttgtttttttaagggtgtaaagtttcagttttgcaaagacaaaaagttctggaaattggttgcacaacattgcgaatgtgcataacactactgaactgtgcattttaaaaaggttaagatggtaaattttatattatgtattttttcatcacaattaaaaattatatttctgggttctcttggtgagagcaccatcatccacccagttctacaaacaagaaacctttgatacctccttcatgcccccacccagtgatctccagaccttgtaggttttatctgctagttctccaactctctgctttttaccatctctttgatcatagtccaagctaccatcatctcgagacaacagcggtggcctcttaaccacaacctcatggacttcttgctgtcctcaaattctttatccagagtgaactgttcaaaagtctgattgtattgggcccccatttaaaagccttccttgatcaggcaaatgcagatcaaaaccacatgacatgtcacttcacacccaccaggatggctaaaatccaaagtcagataataacaagtgytggtgaggatgtagagagactggaaccgttgttcattccatgtgggaatgtaaatggtctttggaaaacagtctggcagtcgcttaaatgattaaacatagagtcaccatatgacccagcagttccactcctaggtatgtatccaagagaaatgaaagcatatgtctacctaaacacttgtacattcatgttcatagcagcattatttagaatagccaataaggtggaaagaatctaaatgtccatcaactgacgaatggacaaacaaaatgtggtagatctataaaatagataactgcttgcccataaaaaggaatggagtactgatgcatgctacgacatggatgggccttaaaaacattaagtgaaagaggaagccagtcacataagatcctgtgggattccattcgtgtgaaatgtccagaataggcaaatacatagacagaaagtagattagtagttgcttagagattggcagagagcgggaagtggggcgggggggtggcagtggttgctaaaggtatgggattattttcctgtttgtctttttaatgaaagcaagatgatgtctgtttattggtgtcttttaaaaaataggtctgggtatatttaggttgcattttccatttttttaatcatggtaaaatacacataacatcaarcttaccttcttagccattttaagtgtatgtacagttcagtggtattaaatacattcataatgttgtacagtcatcaccaccacccatgtccataactctttccatattgtaaaactgaactctgtatccattaaaccataactcaccattcttcccaccctctagtcttggcaaccaccattctactttctgtctctacaatattgactactccaggtacctcagatgagtagaatcatacactgtttgtctttttgtgactgacttctttcatttaatacaacgtcctccagtttcatccatgttgtagcatatgtcagaatttctttcctttttaagctgaataatattctcttgtatgtatacactccattttgctattcactcatctgttgacaggcatgtgagctgcttccacatttcagctattctgaataatgctgctatgaacatgaacacacaaatttctgtttggaatcttgctttccattcttgcgggtatatacgtagaggtagaattgctggaccatatgataatttttaggggggaaccgccatattgttttccatagcatctgtatcattttacattcccaccaacagtgcccaagggttccaatttctctatgtcctcatcaacacttgttattttctggacttttttggtagtggccattataatggatgttacatagtatttgggttttttttttttgaggtgacgaaaatgttctataattgactgtggtgattgtgcatatgtgtgaatacactggaaagcattgaattgtacactttgaaggggtaatttgtatatgtgaattatatctcaataaacctgtttattttttaaaagctttccatggcctactcttcctagcagaaagtccacagtccttcggttggcccttctgcctggccctcatcctcccgtagtcccatctcagctggagactgcacacgtggcttgctggcattctgccctttgcctggctgcatcctcccacccccgccctggtcgcttgcttcgttctcctggttgcgttctcttggttctaccttgttaagattcgagctcaaacattaccttctcaaggaggcctttcctgactccttggactagattcctcatgatgtgtgcttctggtttcctgcatgtacatgccccattgactgtgccagcccccagcccctgcccctagtctgttctgcatcctcaatcccagcaatagtcctccacatgtatttgtggagtgatgaatcaataacatcctaggtcttaagacttatggtattaatgttctgccattttcctaaaatgatttgaagaaacataaagcaaaacaaaacaacagctaataggatgacttataaagctatgttaattaaaacattgtgctctaaaaccaaaaagagatagccagtcagtggaacagaatagaaactctagaagcgtgcctgaataaatacaataatttaatatataataaactagaatgtgaaatgattgagaagaactgaatttatcaacaaaaggtattgaggatgactggttacatttaaaaagtttaaatgtcagaacaacctaattaaaatgaccaaaggacttacatagacatttctccaaagaagataaacaaatggccattaagcccatgcaaaaatggtcaagttcaccaacctttagggaaatgcaaatcaaaaccacgagtcaccgctttacacccattaggatggcttttattaaaaaacaaaaaaacaccacagaagcaaacaaaatgacaagtattggtgaggatgtgaagaaaatggacctttctgcattgctggtggtaaaatggtacagccaccatggaaaacaatatggcagttcctcaaaaaattaaacatagaattaccattgaatccagtaattccacttctggaaggacactcaaaataattcaaagcagggactcaaacagatatctgtacaccaatgttcatagcagcattattcacaatagctgaaaggggactcaacctaagtgttcattgacagatgaaaggataaacaaaatttagtgtacacacacacacacacacacacacacacacacacaaaatggaatataatttatcctgaaagaggaaggaaattcagacatatgctacaacatggatgaggcttgaggacatactgctaagtgtaatacagaagacagaaaaagacaaatattctatgattccaattatgtgcagttcctggagaagaccaattcttagaaaatagaatggtggttgttaggggctgcagagaaggagggagaattgggagtcagtgtttaatgggtatagagccttagttgggggtgatgaaaaagttgtagagatggatggtggtggtggttgtacaacaatgtaaatttacttaaagctgctgaactgtacatttcaaaatggctaaaatggtcaattttatgttatgtgtattttgccacaataaaaaaggaattaagaaagttaaaatgttagctttctactccccaacctccaatctttacagcaaaatcatttctagctttaacatttcagtgtgaaaaaaacccataaaatggtagaagtggctactgatataaccattggacgctgccgggcttgcctaagcatgataccaaggggcagcagccacaaaaacaaagactggtaaatttgaatacagaatttaaaaatgtctgaaaatcaaagccactgttatgttaagttgggatcccaggaaaaagactctgagatggagaattgcctgcaaaagttttattggggagtgtatgggaaagtcgactgtggccaaaagaggacggacggtaggagggagggggcagaggcagagatggaccaccactgtggtttcaactgaggctgttgctgatcccagggagagccctggagctgtaatggcccttcagggcggtcccaaattgaggcagtgggactgggcctttgttttcctgcatcggccagtcactggccctgggctgccccgtgggatgaggcagctccctgacactgagggcaagttccagtaaaggactcagttgttcactgtcagcagctgatattcctagcagctgggrggacaggcatatcagcccagcaaaagggattgaggtggagccccacagtatccactatatctataaacaataaccaaggcagatatttacaacacaggtcagatttctcgggaaactggctccaaacagatgtgcgtgcaggagctttatgttgcagggctattctccacaacagtacctgtaagggagagagggaagcaggattgggcacagagagattgaactgccacacagcacacagttgcagcagaggcctcagctgatgccgcagggagccctgaaggtgggagagcccttcagatttgtcccaaatcaaggcaagggtgttgggtcttcctagccctatgtcaaatagttgctggatgtgggctgcccctggggaggggacataaatgtgggtaacgcagctcacttggccgagggtggcttctggtcagcagccagcactccctgcagctggggkagcggtgcccagctcctgaaggggaagggaggacctggacagtggatggcagccccaccccacccagtgctcctgctgctggcattcactttctctgtttagtaarttcacccctctggcatgtcttccctagaattctatggtttgttttcctaggaagcttacaagaggaagttagagggacaaactacaacccccactgctacagtgggctttgggaaacagctgagacccatcatctctcctttgctctctgttctatattccccagcatctctgctgatttaaatggcttactgggtgggctgagccagaccctcattcctgaggaccctgagcccctggtcctgtgttcttgtgttcttgtcagaccatgactgctgcactgtctatttacttgtcaaaattgggcaaaggaccacggagcactatcccagtggatcacctgggcaccaaacgcactcttccaggcccccatcacctaagagcagccctgcccctcttgatgaccaggatcagttacccctaccagggcagtggctcctcttctggtctgctgggttcttggcacaaggggcctgaagtaaccaggtggtctctgtagctgaaagattaatggtacttttaccattgtctcacacggaaagccttccctctctgttgctcaggccctctagacctgtgctgtccaatatagtagctaccagccatgagtaactacttaaatttaaataaaataagccagacacagtggctcatgcctgtaatcccagctgcttgggaggctgaggccagaggatcacttgaggtctgaccagtccaggcagcatagcaagaccccatctatgaaaaaacaaataaaaattcagttatccactcatactaaccacatttcaagtgcttagtacccacaggcaatttgtgcgttggacagtgcaggcataaaatagttccatgatgacagtaagttcttttgggggcaatgtctctagacctaccataacctaaagctgcaaggatgagaagcatgaattctccaagtgggtcactgggagtgatcctgagtggagccattccgacctctagcccttggttcccagacccatgtattctacctgttgggccacagcaccatgtaatgatcgttcatttagattrttcctttgggttcgttaggttccttcctggaacatggtaccctgtcctgcaggggatcatctccaggctggccccctcacctgagccttcagaaggccattccattgctccatcaggctggtagcttctgagtgattcggtctgtgagaggctccatagtcatgtgaccactgctacctttcctttgctctcatgcagtttccttggtttgaggtgatgttatgtaggatctgcgttagtggatcaaacactctgtaaaccccagacagacagtggtgctggctaaggctctttgggcaggacaggtaaaccataccagaataggtgtagattacagtcaagataaagcacttcctttctggggttgaagatgttcaaatgtaatcaacttgtctccaagtggctggtcgcatccctcgagggttggtgtcatatgggaactcagctctggtctttgttgctggcaggttggacgttcagcaatgtgagaagttagatccgccctggtgagtgggagtccacacttcatctcctccagggctcagaagcacattaagtgctgcctttcaagcagcatctagttctctgctgcagatggcatggccttgctccagaaccctagggtctgtgttgtgattgtcctattcaggcttgacacaaactccacgtggtgtttttttcccaccagattcctctagtactatagggtctgctgggtcatatggctgaattgttagggctgcttgtgctgcagcctggacctaatgcaaagaccttttctgccctgggatctacacaaagctggcagctttctgtgtcaatcagtaaatgggtcagaacagtattcccaagtatgaaatatgctgctttgggaacctgaagaggtcttcttagtgttgggaggcgcaagatgcaatagttagttctcttttctttttttgttgagcaagctagagagagagagagagagagattgagagagagagcctgactcaccctgtcaaggaggctgaagtgcagtggaacgatcatggttcactgcagcctggacctcccaggctcaagcgatcctcctatctcagcctcctgagtagctaatacaacaggtgcatgccaccacactgggctaatttttaaaaattttatgtagaaacagagtctcattctgttgcctagtctggtcttgaactctgaggctsaagtggtcctcccacctcagcctcctgagtagctgggactacaggtacatgccaccatgcctggctaattttttaaaatttcattttgcagagatgggggtctcactatgttgcccagtctgrtctcaaactcctgggctcaagcgatcctcccacctcagcctcccaaagtgctgggactacaagcttgagtcactgcacctggcccaataattagttctttcctttggcgagaatatctcagacttcyggatccctaaatacttccctgatgtggtaggcacctgaatctttggagggtttgtctagttccctctgggtacatgtatctgactcrgtgtccagcatacttgcctctcttgctcagctgacccagtgaacgagattggtcttttgagataaaagaccaatatggtgtcctgcacaatgtccagaggcccttcagactgttactgagagtgggaggattaacatagcactgaacaaaaaccataaatgtatcctgccattagttctatgtaaatgcaaacagcttctgatttttcttccccattgaatagaaaataatggatttgccaacttggtggccacatatcgtgtacctgagtctgcgttaatctgatctagcaaagctagtgctctgggagagcagtgtaattgaggtgctacttggatgactttgcagtggtccactgtcatccaccaggatccatctggtttttgaagaggctaggctggtggattaaatgggaatacaatggggatcactagccgtttattcttaggtctttgtgccgttctcttcccacccccagcaggatgccgtactgtttttgacataatattttggctaggaaagtgggagaaacagtttcagaagcttctgctcggccttgctcaactctgatggctcttactctatagacaagagaaccagtgtggggatcctgccgacgcccagacatggcctttccaatcacacatttgacaagagggacataccactgggtgggtctgtggacctagtagactcattatgatctggacctgggccgggatgccttttcttagctatccctagtataattctattctaacaaggtggccatgtttgtgtccctgggtacagtatcaactcagactgtgtatttaacaatcctcaaaatgtctgggtatttctctttccccagtttatgrttacttgtataaatttgggatgtccctctggagaaagacagagggagtcattattatatatatttgttgtgatgatgttacagggtctttcctcatgggaacctaggccttccttcagacggaggctttcaggtctgcaaaatgtctcaggtccataaactgggcaagggatcataattttttttttttttttttttagtggggcagctgctttcagcctcctgatcattcatttttgatttttcagtttttggctccataaatgaaggamtacctttgttggctgcccatctatctttccctgaggaacaccattctgttaaacgtcttcctagatctctgtggaccaggcccctgactgctattctgaccttgccgctaattatgacagttgcacccaccttgcttttgacagtgaagtgctgctgtctggccttttagtatttgggattctatcatgccgattgctatcaggtagaccagttctgtaacagagttttctgccatcatccccggtctgcagagaagagccagcactgaatatctccatgaccctgtgcctttcctccagtaccctctgctccaccccaccccaccccacccctgcctgtccccgcatggtctcctggccttggttaaatttcctctctagtgagcttacttccatgagctttgtgatttctccctccactgtcttgatgacagttctggcatttctacttcacttagcgtaggccaggcttgtaagagccattgtgttaactccttgtctcaggatacttactagggcattatattctgtatcatgggagggtcctctcatcatgatcaacccatccttaatcaacctgatgctccattccctcatgagccaccactctcacaattcagtcccacatatcacctcttggctcctgtgggacatgctgtctgggtcgcacagctctggtgtgtgttaccttgtctgggcttccatgtctggctgtgttgtgatttgactctagtttttggcctggtggtcaggaagagatggggggatacacgtgcctggggtgggcacgtatgatagcatctttggatcatctttaagcaaggtgacaccctagcctgtgttagggaggagtgggtcagtactgcaggcctgggggttcaggagaatctggagagcagggtcttcaggtaaattgacctggtgtctccattccaagtctcaggccctgttctccaattagagccctgatttcagcatagcagatttgtcagggttggaaatttacccttctctggagctctgctccccttttaaataactcctggggtcctcagctttttctgcccttcatctacatgagatgtgagtttctttatatgctactaagaagtgtcttcgattttcacactcctstgaaattggtgattaatcattctcagcctctcttcatctttccccagcacattgattgtacccagcaacagccatctgattccaagttccttatgatcattgcttcactcaaacctctcaaatgccygtgatagtgccctacccatcttccattccagctggccatggtgaaagtttgaacaatttcactgcttcagcatgccacaggctatgagtgtcccaccgaccaccaacagtggggttctcactgccagctccaaaatctcatattagattttgctctgaaaacgatttctgaagccagttccttaggttggattccctgggaaactgagattctaagatttgtatgtaggaacttttctttggcaagtgctgttaggaataacacctgtaagagtgtgggaagcaggactggaagggggaagagttgaagtgaagcagaagttgaactgaagygggagaagttgagctgcgatgtggttgcaataggagcctcgaccaattctccagggagctctggagctgcctgaatcaaggcaagggatcaggcttttgtattcccacactggatgccggctgctctgagggacggggcctaacctagaccagaacagctcccttcaggccaaggcaatttctggagagactcacttgtgagccacctagcagctgggaaaatgagtgctgtggtccaaaatggataatttgggcagtggtccgcagcatccactaacatagtcatcacaggccaggcgcggtggctcacgcctgtaatcccagcactttgggaggccgaggcaggtggatcacctgaggtcaggagtttaagaccagcctggccaacatggtgaaaccctgcctctactaaaaatacaaaaattagctgggcatggtggcatgcgcctgtaatcccagctactcaggagggtgaggcaggagaatcacttgaaactgggaagtggaggttgcagtgagccaagattgtgccattgcactccagcctgggcaacagagtgagactccatatcgggggggtgggggaaaagtcaacacgtctcaatacacaaaaggaaaaataagaaagagatgaacactccaaggmacgaggcgcaaagggcccacrgtgtaggcttaataatgcctcgcctcaagatgtccacatcctcattcttggatcctgtgaatgttgccttccatggcaaaaggragtttgaagatgtaatgagttaagaatcttgyggctgggtgcagtggctcactcttgtaatcctagcactatgggaggcggaggtgagtggatcacttgaggtcaggagttcgagaccagcctggccaaatggcgaaascccatctctactaaaaacacaaaaagaattatctgggtgtaatggcrcatgcctgtagtcccagctactcmggaggctgaagcaggagaattgcttgaacccaggaggaggaggttgcagtgagctgagattgtgccattgcactccagcctaggcaacagagcgagactccatttcaaacaaaaaaagaatcttgagatggggatattatcctggatcatccaggtaggccccaggtaatcacaagggttcttataagaaggaggcaggaggtcagagtgagtagtaggagacacgggcatagaaccaggaagtttgagtgaggaaagaaaggggccatgagtcaaaaaatacaagtggcctctagaagctgaaaaaggcaaggarcttcctctcagagcctccagaaggaaccagccccgccaaaaccttgactttagccctgtaagactcattttggatttctgatttccagaacgataaaatagtacatttgtgttgttttaagctgataactttgtggtgatttgttatagtagcaataggaaactaactcagactccgtaggaaactcaccaaagaatatatacaattggccaataaaggcagttaaaaatgtggaacttagtcacaaatatgtgtgctagctatcaattgaattaaaattaatgcagtaggatacgcttttactctcaggttggtacaagcaaaaaatggtaattcccattattgatgaagattaaggaaatacgtattttcatactggtggaagtgttgtgtaaattgatataacttttctggagggtgatctgagaatatttatcaaacaactttaaaacctgtatcttctctgatctagaaaattcatttctaggactttatcctaaggtaatggtggaagtattatctattatagtgaaaagtggaaacatcctaaatgttygaggagaaagaattgattgaataaatattgatatagctgtgcaatatttatacagtgttttctgtatccagttttgacatagaaaaatatgagggaattattgttagatgaaaaaggccaaaaattagtgtgtataatataatgcagatttcacttaaaatatgcatataaaatgtcttaaaggatatgtaccataattttaatagtggttatttctggcaagtaacagtttaatggagtttctaatccatatcacaggacagcaaactacagcatcatttttttttttaagcctgcaagctaaaaatggttcatacgtttttaaaacggttgtttaggctgggtgcggtggctcacacctgtaatcccaacactttgggagaccgaggtgggcggatcacttgaggtcaggagttcaagaccagcctggccaacatggtcaaaccccatgtctactaaaaatacaaaagttagctgggcgtggtggtgggtgcctgtaatcccagctacttgggaggctgaggcaggagaattgcttgaaccaggaggcagagattgcagtgagctgagatcgtgccactgcactccagcctgggcaatagagcaagactcagtcaaaaaaaaaaaaaaaaaaagaaaagaaaagaaaaaaaggttgttttaaaaaaaaaaagaagaaataatatgggactgtgactatatggtcttcaaagactaaaatatttactatctggacctttacagaaaacatttgctgacccctgatctgtatcgtctgattttctccagtgaataaaacaatgttaacaatgtaaaacaaacaaaaaagatgtataaacatttccagtgcagtgctttaaaataaatagctcagctggaaaattgtaaaatatgcaaaagggagaactgtaaaatgaagacaggaatgaagtgagtacagagaaatatatgcaaaaggtcttgcatgattgccaaaagtgaataagaaatttggccctgagsttcctagtggaaaaagcaagaatatatacaggatctgtttcatgacccatgatatctaaaacaacccagtgcctcaagacgtataatagtttttcttggctgagaaaataccaccattgcagctttataaagtgaatatttcatgtggtcagacttggagtattttgcccagagtgagaataaattggctttgagtacatggaagaaaagttcttatgaaggaaagtcttaaatttcagagcatgacatcccttaatgctgcccagagctcttgtctatttcctttctgtttctcattcgttccagataagggtcttctgggtgagttgggggtctcacgactagtactwacgtggcttgtgatccctgtgagccacaactattaccacgggacattcatgaggtcacatgttgcccccaagccagggcttttttccttctgcattacttgaacaaagtgctctgcacacactgccctagggaggaagcctactcctgaaggatactggcagtggttccttggaagaacccgcttttaagatgccacattgaataaggactggtctttgtgtgagagtgctggttccgcctctggagggttgacagagcggtggatgsgagcaggcatttgtcttcatgtggagactgmtatagggcatgtccaggtgacatcatctagtgggaaaagctagtcggttacttgagttagccrggtcacaccagcatacattcattcattcattcattcattcattcattcaacacagtggctctccactgaagctgtacccatggagcacctggggagctttataaataaatagggatgcccagactctgccccagtcagaatcttctggaggtggggcccaggcttgtgtatttctaaatacctcccttggtgattctggtgtgcatctccagtggaaaccgcccgtggtggtagaccttgggttttggtgtttggatcccaacttccttgtttattaatcacttgactatgggtggatgacttatcctctctgaacctcacgtttcttgtctgaaaaatgagttaaaaggaatatatgtaaagtatttagcatgctgcttagcaagcagtcagtgcctagtaaaggctcttggtaactgtattagtccattctcacactgctatgaagaaatacctgagactgggtgatttataaaggaaagttttgttgactcacagtttcccattgctgggaaggcctcgggaaacttacagtcatggcagaagacaaaggagaagcaggtatcttcttcacagggggcaggacagagagagaacaagcaggggaaatgctagacacttaaaaacccatcagatcttgtgagaatcactcaccatcatgacaacagcatgagggaaatggctcccatgatccagttacctccacctggtcccgctcttgccatatgcagatttgggggatgataattcaagaygagattttgggtggaaacccagtcaaaccatatcatttcactgtcatcagaatcactatcattgagttacctgagttggccctcaccctggatcctggttctcataactgaatgttgatcttttttgtggccaygtgtttttcatattcccttccgctaaaacagggtcccttccttacatctgagtccctggccagggttccacaggggctggccagataaatgtaaatgaatgaagagaacaggcgtaagggaaatggaccacggcacactgtgtgttaacgcctgctgggagggtttttaattctgtaaggaaatataccctccatttttcttgaaaacgtacagtcttcttggtttatgttttgtttttcacttttaatagagacatggatacagagaaatatttctttaccataagaaaaacaacactttgcaaccgcaatgataaatgtcagctgacacttaaagytgggtaaagccctaaagatggggcatcatggaaatgttgtagatgggagagccctccccctctgcaggggcaaaggctgctcagttccaattgattgttaccacaggkaaacgtggcccagtttgaccagatctactgagttttcaagagaagctgaaaatttggatttttaaaatgttggctcagtttttaaaaagtagcactgtatgagtcaaataaaacatatttcaaggttgaatgtggcctaagagccacccgtttgcaacctctgatccagcatctagggccagctttgctcttgccagcacccctacccagctgcctgttaataaacctccctgctgctgaccccttcttgtctggacttcccccatgttttttgtttccataatcatgtcacagtgctctgccctcctgtggggacaccctcactcctaaatgtgttctggaaatgtggctgtcctctgataggtttccttaagaatggatgaaatgagttaaggcataactggtaactggctcactgttctttggcaatggaaaaatattccttgccaataatttctctcaacactttttcaggcaaagcaacatacggggtaattatttttagatcagaaataatttgggtgttataatgtcagtgtacgtaaacctggtaagattataggaaggttttaaaatgagttttgaaactagtgacatataaattaaatgttgaagtacttgcccacttattactgaaaatatcagctcaactgttgtttttttttcctttttataataagacagcaacacaaggctgggattagcctgtcagatgtgaggcctgtcagatgtgactgcagcaccttccatttagttctgctccatggtcctgcattttctttagggatggccccatcatccacacatttctgcaagccagaggcctacaggtcttcctccacaccccttcctcctctccgccatatccacccttaatatctcctggatccatttacttctcctgccctctgccattatctgctgtaggccatgatcacccagctctttggtgactacactggcctactaattatctccctgtacccactttgacctcctctctgttccttccataccctgcagccatattttcataacttaaatcttatatcaaccctttgcttaggactcccagtggctttgcgttagctagggtaaagtccaaaatctctgttattattatactttaagttctgggatacatgggcagaacatgcaggtttgttacataggtatacacctgccatggtggtttgctgcacccatcaacccgtgatctacattaggtatwtctcctaatgctatccctcctgtagccccccatccccaaaaggccccagtgtgtgatgttcccctccctgtgtccatgtgttctcattgttcaactcccacttatgagtgagaacgtgcggtgtttggttttctgttcctgtgttagtttgctgagaatgatggtttccagcttcatccatgtccctgcaaaggacatgaactcatccttttttatggctgcatagtattccatggtgtgtatatgccacatcttctttatccagtctatcattgatgggcgtttgggttggtttcaagtccttgctattgtgaatagtgctgcaataaacatgtgtgcatgtgaaagaccaaaatctttaacatcackcttaaggtcccacatggattgattcccacacacatcaccactcttatctcttcctttggtctccttgttctctgagccctagcttctgtaccttttcttttcttttaaaggctttttttttaaagcaattttagattcacagaaaaattgagaagaagatacagagatctcccatacaccccttgcttacacacatgaacagcatcccccattatcgacatcccccaccagagtggtacaatcaatgaacctacttcaatactttcttatcgcccaacgtccacagtgtacattagggttcactcttgatgtacattctgtgggtttggacaaatgcataatgacaggcattcaccattaccatattacatagaatagcttcacggccctaaaagtcccctgtgctcccctatttatccctgcccaaccaccgatctttttattgtctccatagttttgccttttccagaatgtcatgtagttgaaatcaagcagtatgtagtttgttcagattggcttctttcattcaacatgcatttaaagaccctccaggtcttttcatgccttgatagcttatttctttttaacaatgaataatattctactgtctggatgtaccatggtttatttatccattcacctactgaaggacatcttggtggcttccaagttttggcaattacaaataaagttgctgtaaatatccgtatgtgggtttttgtgtagacataagttttcaactcctttgggtgaagaccaaggggctctgcttttttttgtgtcttcatacacatgatgtagttctctcctcttggactgctccctactccccactgcccttgtctaggccttctgaattcagctctgatgtcacttcttcaaggatgtctgcctcgccccttcagakcttcttgtcgttgcatgtcctctaaccctcggtgcttttccacagcacccatccgcttgtttgactatttgactaatatccatttcaccactagtatgtatgctccatgccagcatgctgttgagttcccaccatctggcacatagaaagcattcagcaaatatttgttaagtgaatgaatgatgacgaagataatacttattctttctccccattatgggctcttaaaggagctcacatgtaagacagatgtttaaacagacaacatgctggggccgagatgggccatgacaaggctgtgtaccaggtgcagaggggcccaaagttgaggcacttaaacagttcttggctctgtttccatagagcgcaccgtggtgtcagggaagagtggacacccacaattgcttgttggtattcacaagtacccgaccagtgcaacataggtctgctttcctcatcgtgtgtagctctgtgtctgtacacattttgtgtgagcaggtgagagcgatgttatggctgtaagacagaaagactactgaattagagcctgaaaaccagaatgtaagtcccaggatagtccttgtgagctttgtgacattgagcaagtcacttaatctctccaaacctcagtttctttgtggatgcaataggaataaatatacccactcacggtgtggttggagagcagagaaatgaagcatgaaaatgctcaggcagtacctggcatactacatgcatccactaaatacgaggactcagtttctccatgagctaaaggtcagcactgtatgcagattcttctcccttctgattacataaaaagaggtgtgtttgtgtgtgtgggtgtgcatatgtgtgtgtgtgtgtgtgtgtgctgaaaacctcagggaagtccttttaggcacataaagaagaggctgtgctaacagccattagggacagaggttggttataatatcctgctggattttgaattgatatccagaaagagaagttagaaatttctgttttagagctcaggtagaaaaaggaagacagttaaggtaaacttattctacctaggaatcatggaggttacatttctttaaatctcgctctaacttaatctgtttttcaaccaacatttactgtgcatttatttatgtgttatgtttataccaatgctcattttctttcagccatttattttaaaagtttctttttatgggtaaagaagactaactgcttagagaaaggatcccgttgtctgtatagctgtgctccacaactctggctgtgctttagaaatagctaagggctaggtgcgatggctcatgcctgtaatctcagcactttgggaggccgaggtgtgaggatcacttgaggccaggggtttgaggccagcctaggtaacatagagagacttcatctctaaaaaagtaaaaataataacttagctgggcttgggcatatgcctgtaatcctagctactcaggaggctgaggcagtgggattgcttgagcccaggagttcgaggctgcagtgggctatgattgtgccactgcactccagcctgggtaacagagcaagtccctgactctaaaaatgattagttaaaaaagtagctgaggagtgtagccaaaacacatggctgaggccacccacaccaatgaggtcagtatctctggagatggggcctggcactggtgtgtttcactgcttccctggcgatttaaatgtgcagccaaggttgagaaccactgctcctgggcatggggattgactgcagagcctggttgttcagacctcagagcccctctggtggccacctggtaaggccacctggtgccagctcttctcacctgtagtgccttggaaaagacccattgcctccaaatgcgaagctggaaaatgacagtgagagtgacgctccactggggggaaaggctttagcctacttgaggaagacttatcagaaatgggctctagcctcactttgaaggagagtggggaagaggcgggtgtgggagaaggcagagctttttctagagcatgaggaggctgggagctggagaaaagcagctgctcagagaggtgagagaggacagacctaaaaccactgatccaggtgtcagtctcaaatctgctgcttgttggcttgagcaagtcagtaaactctcagggactcagggtcctcatctgtaaaatgaggttaacttctgctgacaagcaccctgcaactgggaggttgttgactactttaataccgtaaatggatgagccataggaagggagttcaagttggacctgagagtgcagaatggggctgggagggaaggtccatggcttctgtattcctaggtcttgagactggaattcaatggaattaaccagactaaactaaaaagtggttatcatctcaggaacagtgccaggcccttgagaacaaagataatacacataatgtaactatgatacatatgataataaactgtttgaccatattttattatggaaacttacaaacatatagtagacagaataccccatgtacctatcacccagcttcaacaattgtccactcatggccagtcttgttctatgactatcccaattcatttcctcttctcccttattattttgaatctaatctcacatgttatatgattttgtttgtatgtctgaaagataagtactcttataaaccatgatcacaccttttaaaaaatcaacattaattctttaatataaaaaaatccagtcagggttcaaatttccaattgtctaataaatgtcataagtgtttgagtttgtttttgaatcaggcccacacattgtgattggttgacatatctcttaaacatctttaaaaaaattgttatagaccaggagcggtggctcacacctataattccagcactttgggaggctgaggtgggaggatcacttgaggccaggagtttgaaaccagcctggaaaacatagcgagacccatctctaatttttttttaaattagccaaggttgatggtgtgtgtttgtaattctagctactctggaggctgggacaggaggattgcttgagttcgagagtttgaggttacagtgagctatgattatgccactgcactctagccttggcaacagagtgagattctgtctctattttctttaacttattatcttgataagctgggcacagtggctcacgcctgtaatcccagcactttgggaggctgaggtcaggagttcaagaccagcctggccaacatggtgaaaccctgtctctactaaaaataaaaaaattagctgggcgtggtggtgcatgcctgtaatcccagctactcaagaggctgagacaggagaatcacttgaacccaggagacagaggttgcagtaagctgagactgcaccactgcactccagcctgggtgacagagtaacactgtctcaaaaaaaaaaaaaaaacaaaaaaccagtgtgtgtatgtgtgtgtgtgggtgtgtgtgtataatcttgataaaatatacataacataaaatttacaattttaaccattttaagtgtacagttcagtggcattaggtatattcacattgtggccaaccatcaccaccatcaccatcactactcaataatcttttccatcatctcaaacggaaactctgtactcattaaacaactccccattcctctctcttcctggctcctggaaaccaccattctacttcctgtccctacgaatttgaatgctttaggaacctcatgtaagtggaataatatagttgactggctttttaaacacagtatcttcaaaactcatccatgttgtagcatgcattggaatttcattcctttttaaggcttaataatctgctattgtatttatacaccacaatctatttctctgctcatctgtcaatgtgtacgtaggttgcctccccctcttggcttttgtggataatgttgctgtgaacatggtgtacaaatctcccttaagcatcttttagtataaagattttcctttcatttccctcctccttttcttttttttccgttggaatttatttgttgatgaaactgggtcatttgtcctgtagtgtcccactatctggggttttgctgatgacctcattagctttggggctggcaaaggtattttgaaatttgtcaattatattgtacttattgtgtgccaggcacaattctaagtacttaaaaaatgtaaatggagttaaccctatgagatgagtactattctttcaacttctgttttaaagacagggaaactgaggttgagcagaggttaaacaactcatcctccgtcacccagctagcaagtgccagggccaggattcaatcccaggcagcctggctcaattattccacactgctgctcaggctagggcattattcagtgacaaggaggtgatgattttgattcctggggaaacaggactgaaamacatgaaaaattttttaaaaataatggagatagaaattctagttaaaagaggaaatattacaagaccacacctgataagtttccaaatgagtaacatatcttgtgaatgtcagggaacagtaatggaaggagagacctctttatagctctcactgaagtcagtgtaaatccagacacatgaattacttcaggatattttattaacatagctgtacatgcttattgttggagaaaatatccaaaatagatggtcatgtcattgagtggaaataaagcaaggtaaatggccacctctctcttcccaatagtccctggatgccacctttccaagagcttcatttgttttttgtaaagtttgtacatatttttgaaacaacactattttggaaaatggagaagaaaatcattaatcctaccattcattatacctatttttctcaacctgtttttcctgtaggcatgaacacaggcatattttgtattgttgcggcactttcaaatggagagtcttatttctaagtgactgaaccttagtccccgggcttgtgaattgaggaggaacgcattcttcttattttgctgctgtttgtatcccaccgctgcagtcaattttgggtaaaaggaaaatgaagacattgttgagtgttcttttgtagccatgggatccctgggaaggactaaattaagctggaggcagtgggtgtggtggagaaggcattctcctccttccctgtcactcactaactctttggggccgtaaggggcgaaactgggtgaccactcagtctttccagctttgaaattccaggatgcttcaatcctaataaaatcagtattttttaacaaagaagaaaactacatttgcctctgagctgtaaaggaggctctaaggttatctttctgaaaaaagaatacatcttttgcaggagaaaaattggtcaaattgagtcttcctgactggtgagttaaatcagttagatttaaatcaaattcacccagctctgccctttcatcactgagagatgaatcaggagaaatctgcctttgaaactgacctggatttggagacatccatcactttttaatggacctttaggttgcggactttcctttgggctctgtgttttctgttgatgcctgtgaatgaagaaaaatgatagccagcatgacccatttaaaaagaatcatatttaggaaaatggaaagtaactcagatgcctagaaattggggaattatcaccaggtattagttcagtgaggtcatcccaaaggtagaatatcaatactggaagaaacttartagtattctagtccagctggtctgtggctggacaccagactgagtcctctggggaaggggtcttgctaaacatccagatttccaggccccattctcgaaaggttcattctgtgggttggggttggggtaaggcctggaatgtcggtatttaaaagctattcaattgattatgatgctaactaagctaggtttggtaacccctgatctagtccagacccatcatgtgacagaagaagaaactgagacttggagagggagaagtgggaggagtgacctgtggcagagcagggcctggagaggcgctgtcaagtacttgccactgtcatacctcccttaaagcggcaaatttgaaggtgatgtcaaaacgtggagatgcatctttaaatgccgttgggtggtagaagtatatcctgtatgggccaggtgcggtggctcatgcctgtaatcccagcactttgggaggctgaggtgggtggatcacctgaggtcaggggttcgagaccagcctggccaacatggtgaaaccccatctctactaaaaaatacaaaaattagctgggcgtggtggcagctgcctgtaatcccagctactcaggaggctgaggtgggagaatggcttgaacccaggaggcagaggttgcagtgagccgagatcgcgccactgtactccagcctgggtgacagagtaagactctatctatctatctatctatctatctatctatctatctatacacacacacacacacacacacacacacacacacaccctgtatgattaatgatagaaaggggaaggggacttaatgaagagtccacttctcaggggccatgactgttggcaggtttctttccttttgctgtcaatttatttggagaaaaaaaaaaaaaccaaacacttaacaaataatgaccatttcaatcgacagtgtatggatggtattcattcttatatatgagaattgtacttgaataactggcatcttttcagtgactaaccttcgtatcagagccagcgctcgaggtaatgaggtcaaatattttaacatcacttgagtagcaacttttacatttatttaacttatgaacaaaagatgggatcagagagcttattaccctcttgcatttcttctcaatgtaattaacctaattcttcctcctgttggtggagcaaggaagggaaagtaggtggcctattcataaaactggtacatccagcactcagtatccagggggatagggcacaacccgtcgggtgccaggctcggggccaggtttgggtttcatgcagtctcctccgcccctgttattcacagataaagaagcggagagtcagagccttatggaacttgccagaatcccagagctagtgtgaggtagagctgagatcaaacttgaggccatctgtttccaaagccctctacatcttctccggcagccacctgcgcatttcctgggctgggctttctctggaggagaatgtggagcagaggaagtgtcggagaaagaatagagctgtgtgaaagggtgcaggtctggcatgatcaggtaaatgcaaaattgctgaatcgcagggtcagatgctagatctgacaatgtacgaatgggcctgtcattcccagtgatgggcaactcagtccttcaaaggaggcctcttcctagaggtgagctctatagcacagggactgtgcctagtcctctagcatctccagaagtccagcacttcacctgtgtttgttcaatttatttagaagcgtaccctaattcagaaagggtatttattttttcttatattgcaaacagatatcctccctgcctcttctcattgtgcctggtactgccctctgagacagatcatgggggacccctggataggaagtcaaaagagacytaggttctagtccttgaagatgtcacacaaccattctgagcctcgctttctctgtaagtaaaaccacattgctggcattgctcatcactgaaggcctacttttgatgccctgtggggacaagataggtgtgggaggaccctctgggagatagctcccagagaactctgctagccttgggactttgtgccagcccagtgctggacaacccattgtaagccatcctgcaataccagagagatagtctgttgtaacatatgaggaagggcctctgaacaatgtcacccaagaccaactgaacgaagacttcctatgatgttctttcagatgatagctttagggcttttgaagatgcgttggagtccccaagaccacctctaggctcgataatttgctagagggactcagagtacaataaacatccagttgtactcacagctatgatttattacagcaaaaggatacaaagcagaatccgcaaagggaataggctggtggggagaagtccagaggaaaccaggtgcragcttccaggagtcctctcccggtggagtcacataggacacactcaactcccccagcaaccaatggtaacagcactgtgaagtgtttctaccaggaaagctcattagagtctcagtgtgcaaggtttttattgggcactgggcatgtaggcaccctctgcttaacacataccaaaattccacactcccagaaggaaagcaggtgtttagtaggaaccatattgtctgcacaaacaatttaggcccagtgagccattcttatcagaggggagtgggaactctcttgaagtccaagtccccagataccagcccaaggccaacctctccagcagatctttctagggacacagtctcagacccgctgtgttaacccttttccgcccagagaaagtattacagtgctcatcaacagggatcccggagccagactgcctggatttacatcctggcctgctgtttgctaggtaattgtgggcaagttatttacactttgtgtgcttccatttcttcatctacaaaatgaaaataataatggtacttacctcatagaacttgtgtgaggattaaatgagttagtctatgtaaagcacttagtgcctagcccataggaagcaccaagcaatacttactagcttagctgctgctgttattattattattgcttttgttattgaaggttcaatagtgctcaatatacatgcttggctgcagtaggggaagttcccaaaggaactgtactcctgttaattagaagtatcctgcccacactgtccctggtcccaggcagggctggagaatggggctttcgcatacacagggacattcagaaccttaggggtggggtggggactcagttgctgatagttttctgagcactggtgaattcaccctggagaaaatcctgatgagagtggttgatggagagaggaaaggctgaaggtgcagggtagccctccaacttcaacactctgatgatagtaacagagtgaactagacacccttcttctagcttctttcccatgcaatgggaagagcatcagcccagcttctagttccagagatgccaccagcttgctaagtaacctcagaccagccctgccactccccaaggctggacgctatgcttttagtctcccagctctgacaaattgtgcttctaggtgcaaagtagattcactacatgctggttaccactgcagcccattgcaccttgggctgcactttgcctgcttgcctgagtctggtgaggcagaacactcacatacaaattacatgaagtggtttattccctacaggtaggcaacaagggtcgacagaagcctaggattcatggcaagccagtctctcaaggctcaggaaagctgtccagaatgaatggagtcttgtcagcgtgtgcctcacttggtccgaagctgagggaccccagaaaacagcccgccctgggttttataccttggggtaacatatattgctgggctaaagtgctgaaggatatcctctttgtagcagggacaggagcaggacctagttgttctggccagtccawccttatatcagaatgttacattcccagtatcttcttttgttttttattttttcatttttgagatagtgtcttgctctgtcacccaggttggagtgcagtggcatgatcttggcttactgcagcctctgtctccaaggttcaagcaattttcctgcctcagcctcctgagtagctgtggctgccactatgcccagctaatttttgtgtttttagtagagatggggtttcgctatgttggccaagctggtctcgaactctcaacctcaggtgatccacccacctcagcctcccgaagtgctgggattacaggcatgagccaccacgcccagcccattcccagtatcttctgcagttattcttragaactacaagtgagaaagccaggagaaccgggttggcccaaggccacctggagaactgtcctgcactagaggcctctctggggctgaatctgggttaacatgctggcaaattccaaggtccccatgttaaacccagggttccttttagattgacacaggcaaccaagatctgtttcagttccctgactcctttcccactgtcttatcctttctgctctttgctgcccacaatgtgtgtaattatccaccacatctgctttggaggtcatgattatgactggtcagtgatcatgtgtctatgtttgccagtggtcagggctgcaagtgtgtttgggtggcgtctgcaccacaactatctgtgtagacacyatctttccctgctgtgtgttgggcaatgtgaagatccggatgggtcatcgctccgctttccaggtgacagtgcagtgagggagagacaacaggtggcactggatggtattctgggttgtaagtgacagaaactcagttctagctaatttcaggagggaaacagaattgattggctcagaactgaatcattcagaaactttggggaaggctagcccccggaggcttaggcagtgtcaccaggacttggctcccttgtcccttcccttcctgggtgttggctctgttctcttgaagcttttctcctcttggtggcaacatggcagttagcagttttcagcaatgccagcaaagaaatgattctttttcctaacagagtaaacaaatatcctcagattgagcttcattgggcctactgggggctgtgcccatctctgccctagtccctgtggccacagggatacagttggctcacatggattaagggtggaagaagggcagttccccaaggaaaatatgggtttctttccaggaagaagaaggtatgaatattgagctaattccgtccctctgcgcaaggagctcgtggtcttatctggcaaagcagacacagaaacagacatagaaagaaaagaacgggctccaactaaaataaaggcagaataggctctcttctctcttaaaatctttctatcagtgaatttcaggaacaaagacagtggaaagaatgtccactatgcaactggaaccatgacacctctgtgtgcctgtgtgggcacgtgagtattgagcatggcagagcagaaaagcagattccatggaggaaatgacttttgtctagaacctgtgtagccacccctgtcgctgccccatccatcgctctygggcactctctatgccgttgcatgctgccctrgcaatttccctctgctaggatctcacagcagtggctggcagggttggtgggtgaatatctcagctccctctcccctccgagtgcccagtgggaactgcagttgcccatggcagggtcctgctcaacagtgccccctggattggttccagtcccttttgcttcacttttccacttcattacccatgccttttgggatcacttcccaaatacacatctttatctcagagtctgcttctgggagagatcagctaagacagcctggaagaatgcttatgatgtggatagatggaggtggcaggtagagagaggcgagggagacagtgcaggaggagggactcgtgtgggaaactatggtgatgaaacagtgcacagagaacagagcagaggagcagtgaattcagcatggcctgagaagcgcttttcaaatcttyctgacagatccacagtaagatgtgcatttcataatgtgttacagtgcattcacacctacacacacacgcgcacgcctaaaacagaattttcacaaaatgaaaacttcctatgtatgatgcacacctattctgttccattaaaaattcctgctcaagatgtgctaaaataatatgatgtctcactcatagggtgggatctgcagtttgaaaacactgggctagagggaatggtgtaggaaacagagtggtgggagatgagaaagaaagctaggttagaccagacctcagaggagcttgatggtcaagttgaaacatttgcacttgactccattgcaggcttttgaggaaggacatgataaattcctagctgagatgcaagaagattcttaggacggcatggggaatgggctggaagaggcatagagactgctgaggagtctgttgccaatgtccagctgagaagctgtggggtctgtgttagtgctagggcaggggctggagggacaggagcagatgctggaggcagtgggcctcagtggctaattggacgaggagactgaggaaggagaggaggaagcgtggggttcccagctggctctctgggaggagggggaggccgttaccttccttggttgttgatgaactatttatcagggcatgaaactttcattaatattattctggtctgagagtctggaaatgtcataaaggacttgttgagtggtcaagcagcttgtacttaatgcgccctggaagcagaactgttcccagggctgccgtaagcgggaagtagccgtgctggaggagccttgctttttgatggatttcattcttaccactcctcgaatcgcccctgttctctcctcgagtgaggccgttggggtccccctagcccatcgacctacttactgcacaattaacatggagccaggctcagggactgtgggggtggtgctgccttctctccttttattctaaaacacttacctggccagggccctgctggatgccagagatgctattaataatttggttcctcctcttaaggagctcacggtcttgtttgggggaagcagacacagaaaccaacatagaaacatgaaaaggacctctacctaaaattaaggcagaatggattctctactcaaaacctgtgcaatcaataaatttcgggagcaaagacagaggaaggaagaggaactcactttatgagcagcactgtgtgccacatgcatgcccgttgctttatgtaccttggataacttaggtcctaaaataactgaatcagtgatttatgggttcgtggacttccctcttaccccatgagaatgctgtgacaggtatctgaaggaggggactttaaaacacagatttttggctggacgtgtggtggctcacgcctgtaatccgagcactttgggaggccgaggtgggcggatcacctgaggtcaggagttcgagaccagcctgaccaacatggtgaaaccctgtctctactaaaaaaaaaaaaaaaaaatagctgggcatggtggtgtgtgcctgtaatcccagctactagggatgctgaggcaggagaattacttgaacccaggaggcagaggttgtagtgagccgagatcgtgccactgcactccagcctgggcaacagagcaagacttcgtctcaaaaagaaaaaaaaaaaaaaaccaaaccacagatttttgtgttctacctcagacctctggaatcagactctgtaagtgcctcaataggggtggaggggagaaggaagcccaggtatgtgcatttcagtaaggcctccaggcttttcttacgtgtgctaagggttgagaatcactgaggaggcagatcttactatctccattttgcaaacggggaaactgaggctccagaaatttcagaaactcagccatattcagtctgttaatatcttactccacattccatgcatcagacctactgatcagctcgtgtgtccctcaggcacactgccctgtctcagaatctctgagtctccgcagtgtgattcttctcaccttgcagagcctgactactgcccacactgctcagaaggaacctcctccatgaagtcctccaagatgccttaccctcctcctcctctccagggggttagaattctccctgctctgggcccgcaaaacacagcttacccaaagcctagaatgatccttttctgtctgtggcacctcttttcccccagagggcatctcgtacactccatgtacatccatgtatggtacctggtaggactgttctgtctgtggtccctcagcatcacggagggtggtttctggccagcaggacctggggcatcagagtggtttcatggaggaaggggtatttgcactatgccttgccagatgagggtaatctgcccctgtatgccaccagcaggtttactgtgtctttggcagttagcagctgagtgtagagagcagagtgagattcataatgtccatgactaatggagtttatgagtctatccccgggatatgtaaggttaggggattgaattcagttcaacatgtgttactggtgcacctactgtgtgctataggtacagcagatccaaaagtgaataagaccctgcccctgcccttatcaaggggactttcagctgttttgagaaaattactatcagattgtttatatatatatatatatatatatatatggttgtattttcaaaggctcaaaactttaaaaactattcaaataaaatggaggtcttaaaagttgaacttagtggaattaagccaagaatcccttttaaatgcaaataaggcaattgccagggaaagaggtaagaatggagtttcagagacagttcaaggtgatggaagactacctgtcctggttgccactatgctgtctctttctctggctaggaaggaggaatcggaatggtgggaaatgccttgttttctcccaggccgggcagggcaggtctcagaatcagcagagtgcctcccgagataaggctatttttaatgagaccaccgggacccttggagctggcagctggcagtgacaatgcagacactgcaagttgcaagccagcagctggatctctgggaacaggcttctgggtcagggaaggggatagtaggaggtgctttctaaagcagagtgtggaaaaccagaattttcttgaaccattgtaagtgggtcttgtatttgaattttttttttttttgtctatgcgtgtgtgagaacaatggttgatgattagatatgaggctacaatttatgccaggttaattaagttgtatttgtaagaaaagtgtgtcgctgcaaggtgtgctgtttttcctctcccaggggtggtgggggaggccctgggtccctaaagtccatttccagggcaatgacagtcttctggcagctgctatcttcattagtgtgatggtgcaggtcaacccaaacatgcaaggtggtgacagatggtagcacacacaatggataatctgggtgactgtggcctgtttgtgtcatgattgctggcccatctaggagcaagaggccttgccaggtgaggacactgctttgagacattataggtgcagggctcccagcatctccttcaatgtgctctggatggagtgacccactcaccttagccactcatgggccttcacagactcttctggaaggaggaaaggagggccagggtgaggggtatggagaaaccagcactggaggtgttcctggaccaaactaagtatcgggctgctatttcttgtggcccaataatgagatgcagatgaactggggaggaagagagtttttatttctgtaactggttatagggaaaaggcctggaaaatatcaccagaccaactcaaaattacaaagtcttccagagcttatatacctcctaactacakgtctatgtgtaagtgtgcattcatctaaagacagaagtgattaactttttaatctataactaagatctgagttcggaagaccttcctctggagcctcagtaaatttacttaatctaaatgggtccaggtgctggggtgattacctttatcttgtcttttgctaaatcacaggtttggggcattcctttagaccctcaataaacttgtttgtggaggcctggggagtttcttcagactctcaataaaacttgtttaatcctaaatgggtcctgttaagaattctttcattatcttgtcatgctataagtctcaggaaaggcctatgcaaaactcttggtgggtttttgtatccagcctttgtataaaggcactggctctttcaacttttaatatttatcttaaccactcggtcagtactaaaacagggcctgcattagtgagagctggcctgccacagagaggccctgggcactgggttccagccccatctctgcttcgcttctctgtcctcttggacaaggtagttattctctttggatcttattctccccagctttaacctgatgggtttgacctagactgtcttcaagcacgctcacaactctgatgatttgagtctgtggtttcagayttggaccataggcatttcttaggaatcctaggacaaccttggggtaactgtattgtgattatgtattttgttctgggtctttccttccagatattttcatctctttgttcccattttcttactgttaattttagctcctcattttcctccccaccctttcttcataaaggattttggagacagaactggatttgaatccaggctctaccactctgtctgtatgaccccgggcaggttatttagtttatccatgcctcagttttctcatatgtcaaaggggaataaaaacacctatccttaagtttttgttaaatggaatactacatgtacactatccrgtatatagtatgttactatatcatctggcctatagtaagtgcattagatttctcttgctgctgtaacaaatgaccataaatttagtggcttgaacaaacacaactttattatctgatagttctggaggtcagaaacccaacatggggcttggtgggctaacatccgggtgtcagcagagctgctttccttctggaggctttaggggacaatcttttttcttgccttttccagcttctagaagctgcctacatttcttggctcatggtccccttggatcttcaaaggcaataatggctggtcaagtcttttttacatgacatcactgggtactcaccctcctgcctccctgttccacttttaaggatgcttgtaattacagatccacatgaatcatccactgtgagctccctactttaaggtcagctgattagcaaccttaattttatcttcaatctaattccccattgccatctaacctcatgcaagttctgggaattaggatgtgggcatycttggggggccattattctgcctactacagtaagcattcaataaataatttttattaatgccattattctctcctttctcttaggaaacaggagggcaggaacacaagaaagggcttggggagggggatgttaaaggttcccaaagtagccaamtgtgtctcccttttcgcatgcagcacgtgcagtcagtaggtaagtcctgtgtgtagactttcgtaccaggcagcctgtcacagaaggattagattttacttggactcactgcagaggctgggaacctggagcacttgggcacaggaggaagttttcagttcgatatcagatgaaagtttttaagggttgcagctcttcaaagttgggatgggttgcccttgaaaggaaggccctccctgtccttggaagtttgtaagaagaggccgggtgagctaactgtttccaaacgttcctcccctcaagaattccttggctctactatagacccaccaaaccagagtcttccaaggagggcccgggactctgcatttakgggcaattcggagtgaggtatttggagacattttagtgtgggttgggagattggcccaaaggaacatctgcttctgagatgctttgcttcccaaattcttgcttctgaaatccatttttgcttttcaaaaacaaaatgcagcactttgggaggctgaggtgggcagattgcctgagctcaggagttcaagaccagcctgggcaacacagtaaaaccccatctctactaaaatacaaaaaattagccagctatggcagcatgcatctgtagtcccagctacttgggaggctgaggcgggagaattgcttgaacccaggaggtgggggttgcagtgagctgagatcacgccactgcactccagcctgggtgacagagtgagactccatctcmaaaaaaaaaaaaaaaaaaaaaaaagaaaggaaagaaaaataaaatgcaatgtctgtgtcaatcctggtagcccctttgtgaagaaatgacctgtctccaagggcatgattcagtttcatctgagacactggggctacaccccaagtgcgctcaccctgaaatgacctgagggcccctctctgcaaagtataggcagactctgaggctcagggggagagtggcagccccagaagccactgctctgcctgcagaggtaattttttgaaaattcttggcctttcatttttgccgggtactttgatggagacttgaaattggttttctttccccagtgcatttttttcatatgaacttaaattgccagtatttctggcatgacctaatatgttgttatgccacccacatcatttttcataatggagaaggtaagaagcccaggactacttcccaggtgagatctgcgactcctgtcttggaatcaccgkggccccatggtgatgcagaagtccaggctccactttgatgcatggagtcagaaccgggtgcatggtggggtatgcaagggacactgygtggcaaggctagagtctggttgtgaagcaggctccacaggtgacttctaatacaarctcaagtttgagaaccaccatcaatgcccagtctcatgggaaaacacagctaaagagaggaatcctgtacccagtctaagaccatgtttgacttcaacttctattcttatctctttgatttgcaaatactccagccacagtgaacttgtcctcattccttgaacatggtctaaagattcagaagttccttctgcctggtctgtctatttttttcagattgtcacatctgacttaaagacccaacctacagacacctctttctagaagcctgccctgattccacctcaagaggcggtcacacctcttgcctctgtgtgtgtctttctttttgttgaagttagagtatgacaggtaaatgagtcatgctgagagttctaggcagtagttctggctctgtctccctcatggttgttgcgggagtaacttcctgacaattactccattcctctctagccctctgagtgtcccccaccctcaactcccatcctccccatgccacccctatggccagcccacactctggcacctgggagtcactctctagaggcctgtggaatgaagggaccactcttcctgaacttgggtctggtgtgcccacccaacctcagtggctgtccccaaatgccctgtggttgctagaagttctgggtgtgccagttttgtgaatccctggtgaaaatagaggcagagcagtatgctaatcagggaaagattgtctttatagagctttatacagctgataagatcatttgcatattctggttcattgttgtatttcgagtaagttacattattccttaaaggaactgggactgagtagcctgtaggaagatttagcaggagatgggctgttgaaagcaggccagctctcagaaaacaaagctaggctggaagctagggattacagagaggcagatatttatgtcagtataagggaggggctttgtgggagttgccggaaacagaagtggcctcacctaaatgtagttaagttctcctgcactggargtgtgtgagcaggaggcgtgacagagggggagaggcatgggtcgcatgcgttccagttccaaggatcactcgttaggttgttgctttccttcctccaacccttgatgtctacacttttgatcgggatagtatagtctatcatttcccagggctgccataaaaaacaaccagagactgggtggcttaaaacaatagaaatttattagctcacagttctggaggctagaagtccaaaattaaggtgtcagcagggccctgcttcctctgaagactagggcaggatcctccttgcctcttccagctctggtggctctggtgttctttggcttgtggcaccatcacgcccatctctgcctcggtcctcaagcggccttcttcattttgtgtctctgtgtcttattctcttcttacagggttatcagtcattggatttagggcctgttctcaatccaggattatttcatctcaagatccttaactgattatatcagcaaagaccctatttccaaatgaagtcacattctggggttccaggtggacrtgaatttcacggggacactaggcaatccattacaaatagaatttaaaaattacacccatgcagcgggctcacatttagaagttccacattctttttggctaggcctccctgcgtgtatagactgaagtagggcccaaagtcgggtggggaggcagttgggaggtgagctgatgcttattgtcctaccctacacctaataggcactcctatagtcagcggcagtctcgtgcatgctgttggggtcccaacttaaggctccactgcacttccctgggtgtctgcctctaggccactcagccccgtgtgacagctctgaaaattcacctctgtgctctctcaggagtggccagtgtaactgaccacagctcagtggctgtgcactgaagccggttaccatgttcatgctgaggccatgcttctggtagacagctcccaaccagcactgagctgagtggggacacaaaggcagaaccactcctgagaaacacaggactcctctgatggatgcctttaacttggggactctccatccaccttgctgagcacccctaaaaaggcactgcagactaaggctcttccacgtccctccccgccctggctcctgcagttggggtccgacttgcattgtggtctgatgctctgtcttctggtgatattgaggatgggccttttatctgttcttattcttttttttttttttttttgagatggagtctcgcgctcttgttgcccaggctggagtgcaatggtgagatctcggctcactgtaacctccacctccgggttcaagcgattctcctacctcagcctcccaagtagctgggattacaggtgcacgccaccatgcccagctattttttttgtatytttagtagagacggggtttcaccacgttggccaggctgctcttgaactcctgacctcaggtgatcctcctgccttggcctctcgaagtgctgggattacgggcgtaagccactgcgcctggcctgttcttcttattctttatagttttttggagaagacattaagagttttgggtttaaatggctgccattccctggactggccagcacccagttgcacctgacattttgccacgtttttcatagcacttctcacacttctcacaccaccctgacagtggtgttctggagctggctggtactggctcatgaaagctgaggttaaattctcaggaattttccaagctgggtgacttcacttttgttccttgaaattggcagtgataggaatattcacaccacggatatctacaaacactacaacctagggtgtcccgaaaccccagctgtttattacacatttaccagcacaccactagctatttacttttatacttctccactagcctgtacttcctgaggctctccagagctcactgcacttctttgctcttagaaggcaccagtgaatgttgagtgaacgaatgaaacctactgagtgttccagttacttattgctgtttaacaaaccatcccaaacttagtggtaaaagcaaccattttatcatgctcaaggattttgtggatcagaaattcagaccacagcagggatggcttatcctgctccatgatgactgggccctcagttggaaaccctgatgggctgagttgactcaaaggctgagcttagctgagactgttgactagatgacctgaccacagcctttccacatggttttggcttctccagcatgatggccgggttttgagacagaatcccacgacagccaggaagcagctgcacagactttatgaaaccttgtcttagaggttccatagtgtcactctcaccatactcaatattgatcagagccatcacagyctgctcaggtccaggaggagggggcacagaacccaccactcaaggggaggaatgtttaagagttttggtgccatgttttaaaactgccacactgaataaggcaaggaactccatttattgagcacctagtttgggccagacattttacatacattatctctacttcttcacaactacctgggaggtattgttattatttccattttgcagatgaggaaactggaggcttagagaggttaaggagcttgcctaaagtcacacagctataactcaccgtgacccttccactaggacatacttctttcatttgtgaagggtcctggggaagacaaggataaatgatacccagtcttgcttcagagaacacagaacaaacgctacctggcatacataccaccctggggcatcttagtgtctagacaattggggctgggtgtgagcagtcatttcgcttcctacaaaccagtcaaggcaatttgtgctgaaagtgctgagtatttgctcttgtccaggctaattcagcttcataacctcaagtctgaaatcagtagtgtagagtactttaaattagctgtaaaatttcaatccaattgctaaactgcctaaattatcaagtttgctcattgctagttgaatgcatgcataattaattttttctaaagtctggactaaaagctgctgaaatcagatctttttcttgaattagattcaaatgtcatagtgaagtgtttggttttatgatgtaatccaaagccatacataagtttaaagaacttttagctgagatttgtatttgggagrgagatgagttagaggactcgattactttaaaattgaaattacattctaactaattgagagtggactgagtctctattaaattcaagtatgaatcatagtattgtcagactgttaacattatcaggattgatggctaacatgtgctaaaatctttcagaatgtaagctctgtgagggcagagatatctgtctgttccattcattacctgttttatcctcaatgtgttgaataaatagttgctggcacatagcagaccctcaataaatgttagttgaatgcatcagttagctaatgtgatcatagcagcaaataagatagaaagttttattatcactttacagatgaggaaactgaggcttaggaaggttagttatcttttccagggtcacactggcaggaagtgtgatagtcaaggcctgaatccagattttgggactttgtaccctgtgctgcttttttcttaagtgtatagacacaccactgaagttcatgaggtgttttctgagttgaaaatcaactcagtctaattttggaagttcatgagatatttctgagtcaagaattagtctgattttgttgggtatcactggtagtttttatattaagatagcatttcgttatgttttcttcactccccagcagcgctatgcagtagaaattcctgtgataatggcaccgttctctatctgtgctgtctcaaatggtagccaccagccacgtgtggctagtgagtacttgaaatggggttagtgtaataacgaaggaactgaattgataaattaaatttgatttgaattaatttaagtttaaataatagtgacctgtggctagtggctgccaatgttggacggtgcagctctatagtttaaaagtattggtaggttggtgtcctcttaaaagccatcctattcaactctcctttttcatttttttaacagagacttgaggcctctcacactgactcctttcctttattgggtggtctttgctggcttgaaaatttagtttctcaattcctagtggtctcccaattttctaaacaaattctctttgcttctcttttctcttttggctatctgtgttttgatcatttctctaccctcttgctgctgagctaaggaaaagcacatgaaaggaggtgaaaattaagtctgtcctgcctcagtaggtctttgggccactgctcaagctcctgtagtcctcacaatrcctgtgtcagtcacctgatgccaggtatccacagccacttctcagtcataatgatgaaagcaagatcatgacattaagtaccatcatgtagtgaataacaccacctccctgccaacctcatctctcattgagtgatcttgcctattaggtggtgttatctccactttacagatgtgaaaattaaggcccagaaagactagtgccagggggatttaagtcagggtttgactgatttcagatttgggcttggctgccttctctggatgcttctcacscagtgatcctttgtgtctgttgttccagggtatctggatacccttggctgtcagtaatagaagagccatgcagagtgacataaaccatacagaaattcatgggctcacaatgagaagcccataggtagggtgggatttggagtcaactcaatcctgaaatagggctcagttattcatgaggcacatgaatacttttagaagcccacaaaagtgttttaatttattttaaaataagaagaaaagaaaaaaaaccttgtagattggagaaaatgttttgatgtaatattaatatattcatcttaataccggtgcagtattaaaatggaggagggaaggggctcagaaaggcaaaaatatctggatcgtcataatgcaactctctttaataacttcagtgacctttgcttgacagttcattgtcccaaattttccaagcacatccttctgggagttgtatgttctcattggcttacacctgaaccaatcacaatcaagaaaaaaggggtgagccaattggtttggaccaaggcaccagtattccatacagcatggctttcatatgtacatggggaaggggtgaccccaaatgaaaatcaagtctatctaaaatgtaagaaggagttgaatgctacgtggcagaccatcaatgtctactatatccagttaatatctgtgggcagagaatgttgaagctattggaggtaggagtgaaaggatggccattcctttcagacttggtttttataatctagtcttgaggaaaagaaaatggcttgtaatttaaggagctcccagcagcaaatgtgcttgcttaggctgaatgattagaatcaacttaggtataaataaggagaagacatttttggcttatcatatgatcacttgtggtattttctatgaaaattatccttttttattaaaatagtagcataaacctggataatctctatttttccctttgtaaataaagaggcacatcatttttgagcatatccaaaaatacatcaatattaagtacaaatgaattcctttgctcattaaacctcaactcttcagtctctttttagattaactttagtgttttgtaccaggtgtgtgtcagaatgatccctttcgttacccagaatggttttttagaatctgaagctttgaggatttcacctttggttctgacttagacttcgtttcaaatttggtaacaagtttaacattgatcaagaaggcaagcccttctctgataaaagcaaggcctataaaggacacagtgtggggaaggacagaatggccccagagctgcagcccctgtaggggtaggtgcacgcgcgtgcatgtttgcacgtggccttttcagcttcacgggaggaagctgggggatccacaggtaagagaagctggctggagggggacacacactccatcatatagcaaacccttgcccttcctcttagggaaaaacatctcgagaatgagttggcaggaggttgttagaggcagggtggtgtgtgaggggtgagaaagttccatttccaggtgtggtttggatcacacagacaacagacagcaaagtgttttctctgaggaaaagtcaagtacagcagcgtagctaatagaaaagctttgaaaaaaagccatggatatactttttatataaaagagaaagaaaaaggtgtttccatctaaaatgggcaatttcacagcaagctcaagtgttttgcagccaaatggtgccccggagctgacaaaatcccagcaaaagcccagggaaggctgtcacttcagaaagtgaaattcaggggacgtttgtagccagcaagctgcttagataattagctaccctgccttttaaaactgatatatttcttgataacatatgactttaggatacctggggtcattgcaaaaaccttttgtttggaggagtggctttggagtcagcacaagcttctagttcttgcttcgctgaagcttccctggtctttaccctcctcatctgataaatgagctaaaatgtaaacggtttattgttggcctaagtgggatacttttaaacacacgtaagttattcttgttgtatcttatgtcatgtaacttttcaattgctacttgtaacggtgcttaagggaaagctacatttttctaaaattttctgtgctttttgagatgtgtccttatctgattaaaagccatttagctacaattggaacatraagtcttgaaactgtttttttcagcagaaagtctggctgcctatgtccaacttcaggcccaattgaacacgccaatttaagactccaggctctgccctgaagagctgcgtgaccttgggcaagttaacttctcatctgtaaaatcagtttttyccttggtcaaatagaggcgctagactagatggcctctggggccccttccagctcatttggtttctgccttttgtcattgactgagcttcaggcttgggggacagacaccgaggagaatggccatagggcttcacagatcagccagcacacggacccgcttcagaacgccctgatgggtgctcatctgtcacctgccctgtgtggacacttctgtgtgacagggcgatcactacttcacaacatagcctttctctgttctaccacttacactgttggtcagrttttcctaatgagactaacagacccgagtggggacagcttacaaagccctctggaatgcagtctttcacatgatgtcccgatgattcctgcattagccggaagaatgaacaagaggctggggaatagcttgtctcaactctctccatctcatacacagtgcctcaacccttgaagctgtagcctgtttcctgggtccatggctcctattctccctaccaagcttctggtggtccaggcaccctttctcaggaggaatttggcctccgaggaagatgatggagagggccacagcttgccatctgcttggcctccggtctcactagcttattcacagagaaagtcccagagtccgggtgggctgtgagtatcatgtggacatctgacattgggggtcactgtcccaaatcggcccaccagtggctgaggctgrcctccgtgaagctgatcccacacccttatggctcaggtgcctcatcttgtttaggaagcaaatctcagagaccatgaaacacaggcagcatctgaaaagcatccaaggttctccttgcagtcctcactcaagaaaggcrgtttcaaacctaggcatttcatgttctcacttattcctgaagcaggatgatgtcaatggtgtcttagaaatcacttccttgtaacttctgtgctggttcagccctccaggagcatctggaagagaagttcaagacagaggcagaaattagtgctcgttgactgactgaatgaatccttcctccaaagaggaagcattttaggccactgcatcgcagagcagaggatgcaactttacataaacaacatgcaaatgcttggtgttgcttcagataataaaaataacagcaagcactcatctagaacttataatgagccaagccttttcaagtacggctatttacataatctaactccaacttcatagtcctaakagatataagtattgttatccccgttgtacagaaactgaggcatggagttaagtgacttgcccaggatcacacagagagcaagcagtagatcaggatttgacccaggctcttcactacctckctacgatttcacctttagctaaacaagaggtccaactcattttcttatcctttttaaaaaaataacagcttttctgaaatcttaatttaattcacctaacatacaattcacccatttaaaatgtgtaatctaagtgtttttgatatattcacagagttgtgcaaccatcaccacaatctgtttagaacattttaatcaccccagaaagaaaccctggagccattggcagtcactccccattttcctccaatccacccaacccctggcaacagccaatctactttctgtctctttggattaacctattctggacgtttcctataaatgaaattatacaatatatggtcctttgcgacagcctctttcactcagcatgatgttttcaaggttcacttccgaatctctacccaggtgggtcccacggctgcagtgcttcttctcccggtcagggagctctcccctctattgttctcccagggcctccctatgcacattcctgagccctgacttccctgtcttaagctctgtcccctgtttaaggtacgtcaggctttgaaggcaggtgcacttggtgtgaatccagatcactacatattgtgtgctccttggctcccttcgcctccctgagtctcagtttcttcatctgtgaaatgggcaggaaccagtccctgcttcttgaggtgctctgaggatgaaaggagagagttgcctaaatgcattccctccagactgtgactggcctgtggggacaggagaatatggatttgattcatcttaggtctgtcttaaagayggagggaacctctgacatcatagctgtgtgtgagtccttgatgaagagtgatcctaaccacactacctctgtgtagagtcttccagtttgtaggggacggtcaccctgttgtctcatttgacactctcagcagcctggcgaggggatatcatagcccctcccagagaagaggctcagggtcttttccaagacccctcaggaggaagtggcagaggcagtttcttcccaagttctcattctctctgtccaaggtctcctgacacagctctcagggcagcaggctgccttctctcaggggcctgggccacgctgggtatgaggacagggaacagtttccacagaagggcaatggtgtggatggtggtgtctcctggatggtcctgagccctgagccgggcatcagtgaccaggagcttccttccttgggcaagtgagtggaagtaaatgtgggagtagggcaggggtggagcagcctggagggagcacaagcgtgcctttgggtgggcatgccgtgtggcaactggggcatgggctgggttatagccccctttgtggggccctctgctgcagccttgacacatcatccaggagtatgtacaggctctggttccaggttcccagacagtagcctggctgggcttgggctgtgcttcctgagtgtaggtggccagcaaagcctctggaggctgggaggagggcttactggcagttaacaccagggcaggtgatggaggggaggttctgcactacaggaagccctgtggagcaacaggctgatccctcctctccacaaattcacatggggaaactgaggtccagagagagaaaagcctttgctcaaggtcccacagtaaattgatgcaagctgcctccctgtctgccccgggctcggggctcctacctggcccaccactgattctcagtgcatttgccagcagccggcctcagcgttctgcagctcccagcttcctccgcatcctgtgcaggccaagttccttaggcgggtccacagagaccatcacagaccatgaggtcaaggtgtctgctcggcctgcagcttgcttccttggctgctaccagcagctccttgctgcctcctcttcctctctcttcccgagagactctcttcctccctactctccctcctaccctaagtctctctgtctttgttacaaccacccgcccaccttttgtttaacatctcatttcttttctactggaagacagtatttgaacaattaggataattgaagtttttctctcccacagttctggccaaaatatatccacctctcatggaacgggggtgagatgccagcatcccagtgggggccaagttctctaggcaggtccacaggacccactgaggctgtgaggtcatggtgtctgcttggcctgcatccttgtgctgagacttgtaggccctggccctgtctgctgcttgccttcctgtgcacgctgcctgtgagtccaaggggaggccagatcttcgtggggctcacattgcacacccctcaggacctggtccagcccctccacagtgcccaggaccactgccattgacctcccttgccttgccctccttactgtccttggctctccagccaaatggagaggctcaaacatctctgcacctgccaggtgacctcacaggacagacggagggcttgggctctgcagtttgactgtgcctttgaatcccagctcagccacttgccccatgtgagacctgagaagttaccgagctgccctgtgcctcaggttccccatctgaaaaatggatatgaagaagactgtggtaggcagaaaaatggcccccagagatgtccatgttctcatggcagaacctgcggctatcttactttctacataggacagatgggattaagttaaggatctagagatgggagactatcctggattatccaggtgggtctgaaagtaacacagggatcttagaagggaggcagatgggtcagaggcagagaaggagctgtgacaacagaagacgggtcaaagagagattagaaggtgctgcactgctggctttgaaaatggaggaaggggccatgagccaaggattacaggtggcctctagaaggtaggaaatgcgagagaatgggttcttccttagtggctgtagraggaatgctgccctgctgacaactggattttagcccagtgagatccattttggattctggccttcaaaactgtaagacaattatgcgtttttgtatgttttttaaaaatattttatttatttatttttgagacagggtcttactctgttgcacaggctggagtgcagtggcacaacctcagctcactgtaacctctgcctcccaggctcaagtgatcctccgacctcagcctcccaagtagttgggattgattacaggcatgggccaccacccccagctaatttttgtattttttgtagagacagggttttaccrtgttgcccaggctggtcttgaactcctgcattcaagcaatcaaactgcctcggcctcccaaagtgctgggattacaggcatgagccaccgcgccccgcctgaagactttattttaaaaataaatttttagagcagttttatgttcacaacaaaaatgagaggaaagtagggaaatttcccacatactctttgcctcccacacatgcacagcctcccccattatcaacatccccaccagagtggtccatttgttccagtcgatgaaccgacattgacacagcgtcatcacccagagtccatagtgttgtacattctgtgggtttggacaaatacgtaatgatacatagccaccattacagaattgtatggagtatctccattgccctaagactcttctgtgtttgtctctgtgttattgaagccactaagtttgcagtgatttgtctcagctgccacaggaaattaatacaagtacctgcctcaccactgtgaaaagaaaaagaggtgacatcaaagagtaccaccccagggcaggccacatggggctgggggggcactgcaaggactttggctttgactccaagcgagacagggcaccacaggaaggttttgagctgaggagtgccatggtctgacatacagtctgactctgagcatcctgaggacaggtgtgggtcttaatcactcttgcttctcttgaaacttgcctagactgcatacatagctagctgaacaaacatttattgctttccttcttttctatcatgactgggggtttctgtttggtagttataaaatatgggcgttagcactttgggaggtcgagacaggaggatcgcttcagtccaggagttcaagaccagcctgggcaacatggtgacgccccatccctacaaaaaaatacaaaaattagccaggtgtagcaatgtgcgcctatagtcccagctaatcaggaggctgaggtggaaggatccatttagcctgggaggttgagactgcaatgaactgtgatgacaccactgcactccatcctgggtgacagagcaagaccctgtctcaaaaaacaaagcaaaacaccaaataaagtaaaataaaataaaataaaatatatgtgagttgcaggtgggatgaaggaagagtcaccaggttcttaagtagaggatgctctgataattataatatttgggtcattaaaagaatgcatttttagttgggatgcctaaagaccattttttttggtggcaagacacatttttttttcggtcttaaaatcttatagtcagttgttttgtattttgattaaaaaattgtgcatttttcatgcaagcccataaagaattgattttcagattcttgatgtgactgatatattgtatagatacacttccattccttctgcatgaggctttcagcaccggatatctgtaggcacattattacagggaagcattgatttttgcctagtacaatatgccttctctttgaggaaatgaaaatcatgacaaataaaaagccatttttcaaaatgactttgattcttgcagtttatgattcagaaatgaggcctgggagaagggaccttaattttctgggctaattatttggctcccgttgtaaaggagcatgtttttcctgaaggagcccttagtaggcccacagagtctgatagcagcagtggctgctttcagtctgcagaatgcgtcgcagttcacagcatgcctttctgttttgcgctctgtgaacactagctgactgacgaggtggaggaatcatattccatctgtggtaggggacaggggctctgagaagcagagtcacaaagtctgtccagactgaaataagacaggatatgtgttctcaaggcaagaatggatggagaaccacacgatgtggatgccatggatacagaacaagaacttggaactggagggtgggatggcagtggtgcccctgcttcactccgcaagtcctggttccttctgtaaccagctgtaacctcggccaagctgttcaacctctctgagccttgagtcccctctctaaggtggggataattgtccccacgtggcccacttccctggactgccatgccttcaacaggagawaatggagaaagtgcttcataaattgtgaagggctctttataagccaagggtaattgctgcgcagataagagctttgactgtagagtctataattcctgcaacattaataacaataatagcttttttttcccccactgagccattgctgtgcctgccgttgtgcctagtgtttcacatgtttaattctcatgatggctttaggaggtaggcacaaatactagtgcacccattttgtagctaaggaaactgagactcagaggtggaaggtagtttgctgagggccccgcagatagcgaagtgggattcagactgggctctgtgtgactccaaaagcctctgagcctcaactccctccaccggagcaataataggtgctgagatgggccagggcaagccgtcaattacagataatgaaaacatctgcagaaaggaagcatgaagctcaaggttacccggacccaatgcctcaaagaagattcaaaacctaattcccagagttccttcttacctcttctgctacccagttatcagctattcttttgtcccctgcttgctttggaggaataccatttaaaaaatmaagggtgggttggcaaagagacattgacaaccaaatgtaatgtgtgaatttctttttaaatctaggatttaaaacaacccataaatacatttttggaacaactgggaaatttaaagtattgattttattttaaataagattattttaaaatatttctttttaaaggtgtagagtggtaatgtatgtaggagacggtccttaacgttaggtgataatccctgatattagaggtgaggtggtcttatctttgcaagctacacacaaataattcagggctgggagcggggagagagagagagagagagagagagaaagagagaaaatattagtgattggtgaaaagacaacaggtatatgagtattaattgtactatcccttcagctttactgtagatttgaaaaaataaaatgtagcagtacagagaaaataaatcaaggggtttgggagaattggcatttgctgactgcctcctgtgggccaggctctgggccagacatccacatgtactatctcacgggtttctcacagcctctctgtaagacaggtgttaagtccattttgccaatgacccaacacagcacagagagggtaagtgacctgcacaaggccacacagcaggtgagtggtgagctggggttcatatgcaggcatgcgtgaagcttgggaagctcagctagaccacagatgaaccctcctttctcccccacactgcgacccttcctcacctggctttttcatgatggaggtgcatacagaaattactttttatatcccaatggaaaccctaaaggctcagtgaaaaacatcatacactattaatcagggccctcaatcagaagcaagaaaaacaaggaactccaagtatcaaaagcttcatttgctgaccagagtccccacaggaaggagagttctggaaaaataaatgttgacatttgacaccacaggagcaccaatttaaaaaggcactttaaccaaaattgacttcacaaaaatcaatattgaaaaatcagacttggattccgatgaaatatcagtctcttgatgtttattgacttgggtaaatgttggcattttacagcccagaattaaaataatagaattttagagctagacaagacctctgagatcatcctgttacctgcctgcaaatctctctttctgggctgtacttaatgatcttgtttttattatgtttaattatcccttcttaaactatgtttaattttataaatctccctcaaatcttggttccatgggcacaaggcctaataaattttttctggggcaggggtggggggttaaaattttattttgtgcttatatttgccttgcttcttacaggtttcttttattaccttcttttgggtttgtctatttttattatttctgttttccttttgctagggagttataatgtttctattcttttaatatttaccctcaaaattgaaaatatataacttctaaaattttaaacttaatatatgtatgctcattacaggcagtataaagatcttagaacacttcacttcacttttccccaccaacttatgttcttattgaatgttttctctttttccttttttataactattttttaaaagaaaagtcaggccaggcctaaactaaagctgtcagtttatagaagagatcattggcaagaaggggagtgacttgccttaggtcacagagttgggaccagaagccccagacagtcacactggtgcctcactttctcctctgggccgtctttctgtcatgattacatcaaggagggagtgaggagcacttagcaaaggctggttccccagggctgctggggaggtggtagccatgttaggcagatgtcaactggagagagaggagcaagagacagagagagacacactgagagaagcactcacagagacagagagggagacagaaagagagatagaagcatacccagtgacagagatagacagagagagagagagaaatagacagaaatattcagagaaagagacagaaagagtcagagagacagagagagagagagagagagagagagagatgcagcagacctttttttttcctttgcatggaggcatcttttgtcattgctgcagggtaagatgcagaacatgtcattaaattagagatactattgtttcatcctaacatgctttcatctgcctaattaaataccgcgcacaaacccccaactattgtgatcgaacaatccccacaaagtcaagattacaaaaagggcacaagwctagtaattatgccaagtgtggttccccttccgagggtgcctatgattaagccatttagagggatcttgtggaataaaggtggatgcccttcatgaagtctgagaccagagaactggagctgcaggatcggttagccctgagcctgacagccatggggacacaggcctctgatgtgggtaaaatcacgtttcttcatgatggcaagaataagaaccacagctactcttttttgagcactttctatagaccaggcactgggctaagctttttctgtacccattttttatcctcacagagaagccaattggatagatgtcatcccattttaatagatgaggaaacggaggctcggagtggtaaggggacttgctccaggtcatacagactgcaggtagtgggggcatcactgggtgcagatctgtctggctgtaagtccactctggccatgattcttccatcactgcctgtggtcttgttctgactccacagtgaacttgtctctgctgtgactttagtgttgggtttcgtgaagcttttttttgtgtgccaacaaatggcctaggtctcctgcattcactagaggagtggttaggattctcaggatcgtgactggagaggatctaatcagagaatcaaggccaaagaaatccctttagggacccaagttctctgactgtgcaggaggttccatctcccttgtcattccttctgctgaatcttggtatttttgtgtggtccacagcaatgtctctaatgcgtatgctttcattatgattccaacaarcacaaaaatgtgactatgagaataaaatcagaaaccttagaggtacttggggctcccagtcattcagtgtccctgctctcccaggctgcatttgcgtctccttgtctagacatcctcaactccttttaggattctctcccttaacttctcatgctgcctttcctttctctgggccccatttcctcacccctccagatcctcacctcctttggggagcagctgggtctggctttccttggtacccctgagcacccaacccarasccggcacccagtgcatgtttagtttgtggcatagtttaacatccattcacacgcacatctgacagaaacttgtgatcatccatcataaagagaatttatcgtggtggattgggaagttatttaaatgcaatgcagcagggaccyaggaaaattctaggtctcatttataccttcagaatgtgaatggaggagagtggttagaactgacatgcagtacctggggaagcctggaatgtagrtatttaaagtgaaatacactgtccargggattgcaattcatggttctgcattttgagggcagagaaattaacaaatgcctaaatcagaaactttagttttaaaatgtagaaaatatattcatacatcaatacctcacttatccagagaacacagatccagtcacttcatctatccaaaacccagctgactctgtggatctctaaactgccaaagtagaagacttttctttcttttttttttttttgagacggagtctcactgtcactcagactggagtgcagtggcgcattcttggcctactgccacctcctcctcctgggttcaagcgattctcctgcctcagcctcccgagtagcaggaattacgggcatgcaccaccatgcccagctaatttttgtatttttagtagagaaggggtttcaccatgttggccaggctggtattgaactcctgacctcaaatgatctgcctacctcggcctcccaaagtgttgggattacaggcgtgaggcaccgcatccggccaacttttcttaaggctcattcggtttgtctgggagctctgcttcgggcttctctcagttcctagctgcacttgtgttgtgtacttttcttaccagttgtattatctttggtttccagactacagcaagtcaaccaattaggaacaagtgtagggttgatagccagcagcaagaaatggcagcttactgcctgacccggagggtgagaaagggaagaaatgtcaaagaccctgaggatttgaaaagcatgttggaaaattaggatggagggcagtgtaacaccccataccctgtatcttccctgggraccacatgtgtttctggcaggtccatggcttgaaattcttaaccgttgtttggatttgctaagtcatttaacctctctgaatctcagtttccttatctataagatggaaatagtaatttatcagctttctacgtgtcagacactgttcttatttctttgcatgtgtgaatttaattctcacaatttaccatgaaggaagtactacttattagcactaagcagttgaggcacaaacaggtgcaaacttgcacaagctcacctagttcatagatgacagaaytgggattgagaggcaggcagccaggctctggagtcacattctggactgtggcttttgttctgggagcaatgaccctccctcccacacagagctgtttagagggtgaaattaaatatgtatcaaggagtccagcacagttctgggcacacactgagtggcctggaagaaaggatctgggctatgtacagcaccatgtgttttttgagagcagggggtcgacaccgattattcctggagggtgagattggaggcaagggaagtggggagcaacttggcacctcctgctttatccatgactgtattgttggactcttctggaagcacgttaccttagcaatttcaaaatatcctgggggtggggaggagaaagaattttggacaataagggcatgtctaaaacctgcagccatgtctaaattgcattttaaaaattagtctttcaaacatggcttaagttggagcacttaatgatatacgctttattatgtagaacttcacttctgtggaacagctgatgccttttcactggtctgctgtgaatgccacctgttactgtgctgagataggcttgtggtccttcctcctttcctcagtaaatctcacaccaggaggactctctgtgcctctggggtctacagctgagacatccagaccatctgcattgaccgtgtgctctagtgtgtctcgcatcctgctaggggctggtgattcaggggtgagttgggtggcatcctgcctcaggagcctataaagtgagagaggcagaggtggccagccagcccagggctgacctgaggttgtccctgagtgggggcatttcttctcatggaaggatccatcagagtggtgtgtcagctgaacagagggagatgaaggatttttattgaaaaggctacaggacagagaagctgttccaggttgagagaacaacaggcagagggaaggttaatataccctgaaagtctgtttctgggcaatagcatcactgagacctgtgttaaaaagagccagctcctggatgaattgagtttacagtctccatttgtgatcaagttctgcagggttgatcttcatgcatgtctgtctctctccctccctccctccccaaagcatctttttatccttctccattctcmtttcccccttcttccctccacagaaacaacagctatctagaagttagttctatgtttctcatctctattgttatatcttactgcagatgtacatgtccataaacaatctatagtatttttaagctttatgtagacatcatactatatataacattctataacccattttgttttactcattttaatttgtcttttatttacttaattaattaatttatttttttgagacaccgtttcaatcttgttgcccaggctggagtgcattggcgcaacctcggctcacctcaacctctgcctcccagggtcaagcaattctcctgcctcagcttcccaagtagctgggatttacaggcgtgcaccacaatgcccagctaatttttgtattatcagtagaggtgggatttcaccatgttgaccaggctggtctcgaacttctgacttcaggtgatccacctgccttggcctcccaaagtgctgggattacaggcgtgagccaccrcgcccagcctagtttatcttttaataggtggttttaattggtttatatttattgtgattagtgatatatttctactctcttattttgagtgttccttctgccactccccctttttcctctgctgatgtggttatatccttaacactttagcatatatcctaaattaatttctttttttctactcaaatctattgctattcaatatcattctcctttactgaatctgatgagaattgtaatcatgcatcacaacccactaatacctgttctatcattgtttcctagaattttggttccaaaaattttaattgttattattttcgtgttacagttagtagttcattaactttgctaacacattttcctaatgcttttgctcgccactgttttttgtgccctattccttcttctgagttcccttttcttctggctgagttcattctcaagttgtacttagcgcatatggtgagtgccaaggatggtcaacgctcttaatatttggatgtcttaaaatgtctctgttttcctctcacttttgaatactgctttagcagagttcagaattccaggcatgcagttacttcyctgcagaatttgtcttttgggtctcttgttactgaagagatgtctgctgtccatccagttattgactccttagaaactgtctttttctggtaactcttgaggcctatgcctggaacaggcttcctctcgcttttatcatattcttttggccacatcaagtcacaaggccagcccagattcaaaaggtagaaagtagactccacccttttttttttttttcttcccctgagacagtgtcttgctccgtcaccaaggctggagtgcagtggtacaatcayggctcactgtaacckcaatctactgggctcacgcgattcttgtgcctcagcctcctgattagctgggactacaggtgtgtaccaccatgcctggctaaattttaaaaatgtttatagagattgggtctcattatgttgcccaggctggtctcgaactcatgacttcaagtgatcctctcaccttggcctcccaaggtgttggaattataggcatcagctggtggtcatgggtgccaactcaccttttgatggtaggagagtcaaagtcattccaaaggctatgggtataggaaggggtgaataactggccatgtttgcattccatctgtcacagttttccaccttgtcctgccatccagagcgtgcagcttcctgtgggctgaggcagcaggtagcagttggtagaacttcatcccagctttcctctagagcagaggaagcccttctctacctgctctgctccaaccctttgcttcaaatagtgagcttgactatagttctcttttgcattgattgtggctctggcccccgcctttacttgggcgtgctatgagtctctgttaccccagagaattctcaatgccaggcacctctgtctgtattgcactcagagcccatcaagcctgcagcctcatctccacttaccatgttgtggttttttcccccctgagaattttatttttgagtaatgctatgtctttaaattttctatttttgwatttcagctatcattgctgtgtgtttattacagcaaggaggaggagacctcaaaatgtgaatttaatttgcgataccaccttggctgggattcttttgtttactttcttcataaaacagtgcttgtcacattctccaggaaacagatgaggctgtgacagcacattagaatgtacataactgtgatagtgagaacaaaagtgcagactctctgggttagaagsggccctctagtgcttgaatccctcctcagcctgtcacacaggtgagcatctaacacctggacagctccagggctggctgaccggccacgtttctgttgcatccaagcatagccctggctttgaaaaaaatgccgttattctccagctggtgcctgtctccctgcagctttctgccccagcccccatatcctagttctggtcctttcctctggaaccaaacacactgcatctgtgctctctgcctctgagagcccctcagagctgtgcaggccatgctgggcctgagggggcccttctactggctgaacagttacaggctctgcagccaagactcgtgggatataattggctgtcctctctccagactggctgactctggggacaatctgcaggtggtcccttctctcttcctgggcagggcccagatagagcctcaaagatgggtttggatagaccaaccagaaactgagcaggcctgttctccacctccttgattctggaatgaatcattctcctggtgtagcctccagctgtgttgtgagatgaactcacatggctcctcggtcaattgccattcattcattcattcactccttgggcgcatcagggaagcagtgctgaacaaggctgccatggaacgtgaggtctagtgaggcagacagatgtagtgtgaccacagccacgagggcaaggtacccggtggtgggagtgtgcgtggctggggaacctacccagaattggggaggcttttctaagaaagtggtgtgtgctctgaagagcactttctcgttttcttaacatttccaaatccagattttcaagagagaaaatctcttccttgccagctcatttttcctgggtctacaaggttatgggtcagcagctagcctatggcttgggtttacataccttgtccagttagctaggcctgggatataggaatcttccaatttcattcattcattcattcattcattcattcattcactcgggtgcacttgggatgtgatgaaggaatccatagcagttttcattgttggagaagctcaagtaggaaatagttagggcagggatgggatggggtgacagtaagtgtggtggctccatgctgaaggagacatgcagctacaagggactgtgagtgaagcctaagacaccagggtgagcaagggacaaggtaggcagtggaaatggcagcgrccatgccacagagggccttacagggcaggaggcagggggtggcattgatctttatcccaatctttatctccggggggctgaggagcccattgttgggtggaagtagcccagttgggagaggacaggatggtggttctgtaggcagcggggaggaatgacctccctggacagagggagacttgagaaagcagtggaaggtggggagagcgatgtcaaggaggcaccttgttttttttgtttgttygtttttgtttgagacagagcctcattctttcacccaggctggagtgcaatggtgcaatctctgctcactcaacctttgcctcccgggctcaagcaattctcctgcctcagcttcctgagtaactgggattaaggaggcaccttgtatttgcttcctgtggctgccagaacaaattgccacaaacagggtggctgaaaacagcacacgttttttttttttctcacagtcctagaggccagaagtytgaaatcaaggtcttggcagggccagggtctctctggaggccctgggggaaaaccaatccttttgtgcctctccctgcttttggtgactgttggcattccctgacttgggtctgcagggttccaatctctacctccctggtcacattgtcttctctcttctgcctgtctagtctatttctgcctcactcatgagatttatagcctacctgaatattacaggataagctcctcctctcaagaaccttcactaaatcacatttttgccatgtaaggtaatattccctcttttaccatataaggcagcattcacagttccaggagttagggcatggatgcatatttttgcaggctgcctttcagccagcgcagtgctaaggacctgactatagaagtgagccctcacgtagtgcaggctgtgggccaggctctgtgtcctgactgctccagatgggttgactcattttaaacctcatgaaataggcactattgtcatcctctctttataggcaggaaactgaggctcagagaggttaaatgggcccactgtcacgccaccaggaagccaccaactgggagttgagtccaggcagcagtttctggagcgcttggcaggctgcactgccctcctaggcrgggcggatggaggatgggtgctgttcactgaaatgaggcatctgggagaggggcgcagggaggacaggagtttggtttggggcatggtgagccacagcccctgacatccacgtgcttctgtgtccccttcattgccaagtgcagcctccgtgtctgggtttctgatcttggccatggcccctctgcccttttggcttgtggaaacagcctcccagtgcttcgatggcaagccctcttcagaaccactagtgccactgcccagtgtcctggccctgagcctgggtttggagctctcagcgtccacacaaactgagtagggtagcagacggggcatcacaaagactttgaggatgtaagggctgtgccactggcacccaaggagcctggagcccagctctgccccaggccactcccagcagccccacccttctgagggggcygaaagctggaggccctgagcaccatctcccctgaaccatgccttgctcactgctaaaaacccaccttggagccctgcccttcaaccagttttgccactcattgcttagggcttagggctcagcccacccagatgggttatagctgggaggggttaggtgctctgttatgtggaaaaatcacccaatgaaatgtcaggagaccattcccactcctccccgacgttcacttgaaatatgggcatgctttggatttcatagatggaagggtaagggcattcgaggtgcgagaaactgcagggaggtgaggagcaaaggcacagaaatgggaaaagataaattctgcttgggaaatgccaactgcaagatgactgtgatgtagggcacctgaggtgggtgacagaggggctggaagggggagtgggggcagaattcaggctgtctgggatgccagtctgtaagagatggaacaatggttttataagaaatgattctatgtcaattgcagagattctccactgatgcatgttgtttgtacatttttttatatcacaacatcgtttattatgtgaattttttacaatacaaacaaaaaatacagaaatgcaatatatgattacagctaaatgcagaatggtgacttttttctcttcaagaggccgtgattcccatttctagtaaaattaagagactgcatawaggtagaaacaggttggtcattagcttcacaattttgcctagaaatgatctataaatgcattttccccctgctacttaccataaagtgtaaaaaggagttaaagaaagtttccttgttggttcctaccatatgaaagatgctatattctatttcagcagggccaatatgtgaacactatctaaattaaatgttattacaaaaatgaagtagtaatgagattctggctaaagagtgcactaaatgagaataakatatatttaaagaatccaaaacaaacaaaaagaagttgttataaaaaagctctaggtgcactgtaagcatatagggttttttttccatgtgtatttttaaacaatggaagtgtcaaaacatagggtcaactgtgttagactaaattacattattgtatatactgcattgaatggaacctttgtattataattatcatagagaagcatagtttgcatcatattatggccttttatcctcaatgaaaaccttccagagtccttttattttggaatatcttgtaaacaatcaaaccgtcagaacatgattatacaacagtaaaatgttatcttgcattcaactgaagataatctgtttaataaaaaaagaaaaagaaaaagtaggaaaagtagagctgttactttctaagtacacaacaccctagacaattgacggcatcttaatctccatcaagaacaacaacaacaaaaataatgtgtgtcatgctcttaaatccatcattatagataaaactggctcaaattggtcaaacggatccaacaaacactgatgtccaagctggcatattggcaactaatacgtaactggtggtcaatagagagtttaaaagatcttcctttcttcttgttcttttccaaggttctcgaagagttcgttgttctaaaatacgttgttgagcttcccagtttgctttctcatcctctaactgatgacgtttttcctctaattgtttatgctgtgcttccaaattccttttcatttgctcatggtgccgctggagctcagcttcagagttcttcagttttgaactttttctttgaccttcatctcaaacacctgctccatctccagctccatcttcttcattttagctacatgctcccttctttcttcttccatttgtgccggagggctcttggtcagctgccctttattcttgttgttatcaattccattataagtcacagctgccagttttctgcttctgtagttctcatagtggacattattagtaacctctttcaagtcctgcatgtgtgttcttatcaacatatttcttagaattgtaaaatcacagtgttcaccattttcaacttcagcaataccccaaggatgctgctttcctctgatcattttgccattaactttgatgatagtattactacctaccacaccaacaggtaaatggtcctttatctttttaacaagtttattttcttctttattatgtttctagaaattcatatattttaattttatgttcttgggtttctttcattatctgttttttaaactgttagcattcctctggtgtgagtgtgtcttctgtggcaataagtgagatgatactgtttcatgcaaacgcttcataaactcaatattcaatggtttaagtccatgtcctgaaggagcaatgaagtataaacaacgctacaccgttatcaggcatctgacgtccgttcacatgcgattctgcatttacgtagtcctcaagtttattatcaatgtagtcgattgtaaggctgccagcaattactattatccactgcatctccaaatcctggggtatcaactattgtgagcagcaactgaacaccaccttctttgattaaaactttggattgttccacccactaccatagcgtgaatcaaaaccagatctcttaactgattttctgtatacttggtttgggagattggcaaatcccacatagccttcaggggtcttctgttgagctaccgagcgacatggggcgagcagcggtttggatgcmggcggagccgcgggcaagcaggaagaagatgattcttaggtctgaatgcctaggaattcatgtggatcaatcagacctcccatggtgctgctgtggacgcttctctcctcagcagcagtggctctcgcactgtttgtactttttttttaaaaaaggaaagttatcataaaaaaatgataataggtcaggcacggtggctcatgcctgtaatcccagcactttggggggccgaggcgggcggatcacttgaggtcaggagtttgagaccagcctgaccaacatggagaaatcctgtctctactaaaaatacaaaatcgaccgggcatgttggcacatgcctgtaatcccagctactcgggaggctgaggcaggagaatcgcttgaacctgggaggtggaggttgcggtgagccaagactgtgccattgcagtccagcctgagcaacagagtgagactccatctcaaaaaaaaaaaaaaagaaaaaaaaaagataatagacaccacagtgcttctgatgtgccaggcattattacaagcagtttgtatgtatttaccctttaaatcctcacatgaggtgggactgtaaactagttcagccattgtggaagacagtgtggcgattcctcagggatctagaactagaaataccatttgacccagccatcccattactgggtatatacccaaaggattataaatcatgctgctataaagacacacgcacacgtatgtttactgcggcactattcacaatagcaaagacttggaaccaacccaaatgtccctcaatgatacactggattaagaaaatgtggcacatatacaccatggaatactatgcagccgcaaaaaggatgaattcatgtctttggtagggacatggatgaagctggaagctatcattctcagcaaactatagcaaggacaaaaaaccaaacaccgcatgttctcactcataggtgggaattgaacaatgagaatgcttggacacaggaaggggaacatcacacaccggggcctgtagtggggtggagggacgggggagggatagcattaggagatatacctaacgtaaatgacgagttaacgggtgcagcacaccaacatggcacatgtatacatatgtaacagaccacgttgtgcacatgtaccctagaatttaaagtataataaaaaaaatcctcacatgaactcgaggagaacagttccattatcccgaattacaggtgaagaaatgggatgctacgaggttaagtgatgtgctggagtctcatgactagtctgcttatgtcacgcagtttgaagcctcagttaaagaaagatgtgaatgtgcagggtatcctagaggcactccttgccatagccccaaatggcagcagcagtccctagacccttagaagatccattaagaaaaggaagtgggcccctgaggaatcacggtgattgccgacctcaagctgggcttgtgggtttccccatcacgttcatgtgggcatacagtagctctgtaaggcaggtgagagtccgtagcctgagatacagatgcaagcttagcctcagggtggcgagtggcccactgcagatctgcagtaccgtcctggggaatggcagcttataccaaggccaccttgctccaccctttctgaaaatccccgtgttcatgctgagagctgtgctccccttgttgcctccaagctctggggctcacagcacctgagactggcagggcaggtgcagttggaaacctgacctggggatggctactccgctgttgcactgtacatccctgtggaggcctcaacagaaggagaggggcaytgctgccctggtttcgtctcatgggcacaccctgacttgttctgccttttggccttgccatgtacgtatcttgtctcctggctgatggcagcttccatgtcattaggggtgatgtggrtgggagaccaggagggcagggaccacgtcagccttggctcttggtccttagctctggtgtggtgaatggcatatcatgagggctcagtcattatttactggatcagggaaagaatgattgactcctgggagatgaggggtctagattggagtaccagccccgcaaacaactagttgtgagtcctcaggaaagccacttaatctctccgagcctcagtttgccattagtaaagtgggtgtgataatgtttgttttgagtgttacagatgactatcaaggggaaaatgtgtgacatatctttgtaacctagaaagggccttatataaagatctttctcaccagcattatgattcttatgattaccattgttgtctctattagtatgagcatccagccagcattaaaaacaaatgcatatgtaaggaccaatcttccagtgagtgttccaatttatgcaggtgttggtcaatcagtaagcaatttctgaggccctactctgcccagccttctacatgttgtgggtagaagggaaaagcatgacaacacaatcttctggaacaaaagcaaacattcggagcccaaaggatggctggtggctattttaggaagggtgagggcgatgttggagcagagaccaagacactgagaacttcggtgaacctgcagtctgtgactccatagagctgcatggatgtcctgtcctgcagaaactgttgctcaataaagccgatgaaatggatgtgtgtgggaggttgggtgggggaataagcraagctccttggcaggaaaatgagctggcgtctcaaactttagtgtgtacccggatcatcagggatgtgtattaaaaatggagcagccctagagattccggtttggtaggtctggaatagcgcttgggaagcggcattttaccaagcccccaggtggttctgacgcagtggtctgcatctttgaaaagcaccaccctgtgcccgggcgggtctccaagcctcagcttccagctgtcaaaacccagccaaacagagctacttaaaaatgcacagaacacaatgagagagcacacatctgaattctaggtgatattttcagatggaacgggacgttatttttgtccatgttggtaggaaggttcttggggtttagtgaaccagagcggagtctgttgctccatgctgctctaattatggtccctgaagctctcagtgggaagtaagaaccagaatattctttctgaagatcttgtgtgctaccctggaaggtctgttttgcaaaattaatcagctttgggccagtttcttatcttgaaccgtttgagatttctgagctgcagttgcagaaagcatgcttwgggaaaatcacatctttgtgtctttgtttctctagtgcactggtggagcctgacttgtgtgccaggcccagggtgggaggcaaaaatcagagagrtgatccttgcccttgagggaggacaaaaaaagcaaacgtagagctggagcatgaaggagaataaaagaagtgttgttggaaggttcagtaaggatcttgagagaataatatcaaccaaggggaaactggataagaaatcaatttcaaaatttccaggatgaaactgctccctaaaaagtaattagcgatattaaattcctcctctctctagcatgaatgaaccttggccattgaggaaacacagtggaaaagttccagaccaaatcctttgcctgagaatgtccacccagatcttagttgtaacaggacaatgaggaagttgctggaagaatgatttccagcctttggggatcttgtttatctttctgaaacagggaatgccttggcaaatgaaatgaggtgctctgtaggagacggggcagagagagtgggggtatttattgacatgaaacccatttctctcttagtccaaatttgctgagcattcagtcttcttagcaacaacaagaataccagcagtagtcccttgggggtggccaagtcctcgtgtttccagagcctgtgttttcctgtgtctgccggccctccctacagctagataaggaatcactacactttatagataggattggaaggcccagagaagcaaagtgacttgcctaaggccacacagctgaacccaggccatgtctgctcctgcctgtagcatactggactctccagtacagactatggccccacgttgtggaatccagtgaatgtttgggtgtttcagggaagactgtgacaggcacaaggtagtttgctaaaaaaagaaaccgagcatctccgtgagaacttgcactctctttcctccagttttctcccctcccactgaatcaattaacaatttcaaattgttccctagtgcttgggcaggtttgttttaggattattatgatcatcgttattgcagggtgtgcttcctgagcgatattaaaatgaggagttgtaggctgggtgcagtggctcgcgcctgtaatcccagcactttgggaggtctaggagggaggatcatttgagctcaggagttcaagaccagcctaagcaatataatgagacatttaccatttttttttttttttgagacagagtctagctctgtcacccagtggtgcgatctcggctcactgcaccctctgcctcccgggttcaagcgattctcctgcctcagccttccaagtagctgggattacgggtgcctgccaccacgcccagctgattttcgtatttttagtagagacggagtttcactgtgttggccaggctggtctcaaactcctgacctcatgatccatctgcctcggcctcccaaagtgctgggattacaagcgtgagccaccgcacccggccaccaacaattaaaaaaaaaaaaaattaaccaggcatggtggtgcaagcctgtggtcccagctactcaggaggctgaggagggaggattgcttgagcccgggagggtgaggctgcagtgagctgtcatcacaccactgcactccggcctgtgtgacagagcaagactctgtctcaaaaaaataacaatgaaaaaataaagagccgttcaagtaaaatctttctaaaaccaactcagcaactcagctaagggtcttccctgtggtcacattgtttgtgctgtacttgactttggcaatcgcaggcagctggggcttgacatccactaccccacacttgcatctccaggctcagcctggcagtgcccacctgaaagtcactcacagcttccagtgggagatgggaacaaaccagkaaacattcacaatgaccagcccttggcccatactggccttaacagagcttcaagagaccatggtgccctgaggaaaataagggtaagtttttaacagagctractttgttgttttaaagaacacccttcactttgagatggtgccttcccttccctcctcctccttcyttcttatgtcctttaaaaaattaaattgtggtgatagcagacattaggatttgtttattgatttatktatttcatttattattttctttttttaagagacagggtctcgcttcatcctccaggttggagtgcagtggcattttcatagcttactgcaggctccaactcataggctcaagtgatcctcccgccttagcctcccaagtagctgggactacagatgtgcaccgccatgcacggctaatttcaaatttttctgtagagaygaggtcttgctgtgttgcccaggctggtcccaaactcctggcctcaaatgatcttccctttttggcctcccgaagtgttgggattacaggtgtgaaccactgcacccagcccatgttttgttttttaatgtctttacttgagaaaataaaatttgacaatctacattggtattctgatacgttttgttttgtttggaaattgtgtgttttatgacagtctgagcagcactgttattgttgtagaagtttgtatgaggtcagtggggcacagggtggaagtggtcagtcctgtttactgrgatcagggaggatttggagcagaaagtgacatgtgagctgagccttggaaagcacagtaatagggtgctcaccgggggaccagagggccatgaaagccttttgatcagtgagggacatgataagcttttcattttagggagatcactctgaagggaggtgaccagcagaggggaggtagcaggcctggaagcagagtcacctgccacagtgaggccagacacacgcatgtggcggtgcggtgcagaggctggcacggttccgtggatactcagygagtagaacgtayrggacttgagactggctaggtgtgaggggccacgcaacgatggagtcttggacggctcccagttttctgccttggggaacctgcagaggtgaaygttgatactaacatgaatgcaaataacaatagtcatggtgacagctgatgtttactgagcccttctttgtactgggcacttgctgakcaccatgcctatgcagaaggcttatgcrgagaaagcaggtttctcagagtcagaatctagagcccctctctcacccagtcacatctgtattctgccttctgggacactgaccacattttaggggaagatggccagtccaggtttggacctgtgggtcacccaggtggagatgtgtggtctggagcttcagggaggtggaggttgggatttggggtcatcagcctacagatgatggttgatgctattggagcggggaggtcagctagaaatactccctgggaagaagtgctctgcccagcagagaaggaggagctgttccatctttgcagccctgatgcctgtcatcttagctgtgatttgggcctctggttgtatatttcctgcagatgtgcctggaatcattgaaatgagaaaaggggagatttggggggctgcacagcccttccttgttcttcttattttttcttgagctttttatgatggatgatttcagatgcatgcctcagtagaaagagtaggataagctgcctccatgagcccatcccccagcttcagcaattagccagcgcgtgcctgcccctttcttaattgactcttcgcattcccactctctgcatccaggcagtttctattaatactgtggagctcctgctctgcccatttctcctactgcctgctttagccagaccgggctggtcagtcctcaaactgccttgtacccacccccatctctccctggcattcctacctcaccttctaattcagacactgtgctgtccccctcttctcaacttggccaaagcctcctggtgccatgcggggtggggtccccaggtctgttttgtgtcctgagtttacacctaagcctccttgggcaggtcactgtatacccgcatgccctgctcagagcccgtcagcaccactgcatactgtgtctgaggggcctggggccacatgctccgtaggacagaggtggccccctcagcctgggattgaaggtcatgtgtaattcaacctccatcaggtcaggagaaaacactggcccctcaccctgtgttgaaactttaagattmccctggtttcttgagaggttttgttttgttttctctgttcatttgctaaacaggcctggtatgtccattgcaggtccyaggttgagaggacccaaggtgatggagtgaggcccagccactatggcaaggccctcagggggctgctctagtctcctggtgttcattgttctgcttgtctacagaaccttccattccaacaaaatktgctagaagcccacatataaaatctccagaagggaacccttctggttaaatggtggtggggactcagagccttgcccagtagggtcatgccatgtcagtctttcttcaagaggcctcctgaggaactgagtttgaarcccctaggttggagtcctcaccttcaaggccaccaaagatcccacccaggaatgaggccttctctgccattccccacagatacagcagctgggggtgcccgtcttgtctcccggtcagcctgagctcagtgccaggcccaagaaagatggcacaggcatggttcttgccttcaggtaggtctacttcagagggctaaggaggtagggggcaggggagccatttatgtctataagaggcttgttaataaaagacagagtgaaaaccatatagaggacatgtggtgtactgtgatggaacagggaaaattctgcccatctcacgtggcctgtaggtgggcttggaggctgggttgctgtgtgatgccgcctcctaggtagccaggttcatgctcgctggatgagcttttaggtccaagtgwctgccagccatgtggaagcccgttccagatgcttgatctgctgtgtgcgcacccctggttgggtgctgctgtgacagctgaagacgaaagtcccaccccacccgccccaagttagatctgtcgtacagacactggttacgcacgtttggggattttttttttcttcttctttcctatgtgaagttttagtttttcagtaaacagtaattaaaacaaatgtacacagagacaacaatgccgcattttaatttatttatttcagctgactgcacccgccagcctcctagcaaaattcctttgttttcttctttatgcacgatattaacaatagatctccctgtgtagttttgtgttcaccctgtttctagagagtgtggaggatgcaatgggtgtggcgtatgaatctcatactttctacctgtagagtaggtgatgcacttcctgaactgtggaaaatgaagacgctcctgtccttccttttcaaaagcctgctcctccaagatgtctctctggcctcctcagttctagtcactggcctcttctaagaaagaaatttttcaggtggatgttgtcattgaatgagcctagcttagggcacagctcctagaacttgcttataagtaggctgggcgcagtggctcacacctgtaatcctagcactttgggaggccaaggcgggtggattgcctgagctcaggagttcaagaccagcctgggcaacatggtgaaaccccatctctattaaaaatacaaaaaattagccggaggtggtggtgcacacatgtaaatcccagctacttggaaggctgaggcagtagagttggcttgaacccgggaggcagaggttacagtgagccgagattgcaccactgcactccagcctgggagacagagtgagactctgtctccataaaaatgaaaataaataaaataaaaagagcttacttataagtgaatactctcttccctgctcttcccaatcatctacccttcccctccccagcattttttcttattgctctgagtgcattgctggaaatttccttacctgtgccctcaccccaggtggctctggggattctgggaaggcagtgatgcttgctgccacttcatccttgagccctccaaccaccaagattcatgaggttgtgggtgagtgcacagacaggctggcctcaagcccagcttccctcctgctgtctgtgtgtcctggagttggttatgtaaactctttgagcttctgtttccaactctgtaaaatgggggttgctgtggacatgcagcttcatgagatgatgcttgtgaagtgtgcaggattttccctgccacatagcaagcttcaggagttcagtgccattattattatttctggctgctgttattgccaccctagtgggcactcagcccatgcatgttgtccctggcatgttgtccctggcatgttgtttgtgatcrcaaagttcccagcataagaataaaattctgtatgctctgttgtgcaggagaacacacacattttttgccatctattttagagcaacatgtatggaatcttggtggggtggcctgaatcctaggctgacgggtgggggcctgcagatctcagataagctgcaccacttgggttcacaatgcrgtgcttggcccagacaacccctgggatcccttgttgacctaatatttcctaaaatatgagtatctggagactgagcacagcataggggtgggccttatcagctcctgctagggaaggcgagtcagccctggggtttcatgcaaagcttcgaggtrgtcgcctggcctccctcagtgcttgcctaaggcttgcaggctttggggaggggagctgccaattcccatgcatattgggagtagggatgctggtgggaggtcttacctgctgcctgctctagctgttaaggggagggggtcttgcagaatctgtgactctgcccctccaaacgcggaggcagctggtgaatggaggctgtgttttgcagaatgcaagcgtaaggatggaaacagagccctgggcggcagggtctaaaagcctggttgtcatgtcaacagattggcccaaaatagtgagaaatagcaaggggcaggtccccatatggtcctgtcgtgaccacatcgccggctccttccatggcagggctgggctgggccaggctgttataggaataaaattgggaggggggctttgaggatatccccctaccatttcctcaggagggaccagagagggcaggtgtggtcctggtccttcttagctatataaatgtgaagcccgagaagggaacccataagccagagcccccacccccaaggctgtgctgtgactgcctttatttcccccattgggaaaattcagcaaacaggtaggagcactcagtgtgtgcaggtgcaggggtcctgaggcagtacatggaacagctaacatctcccaagtgttcaccrgtgccagcactctttccagccctttgaatgaatgaattcatctgaccttcaccataacagcataatgtaaacactattatcatcctcgtttatgggggaggaaactgaagctaaaagtttgcccaaggtccttcagctagtaagtgggatacttgaagtcagacacctggctcaagccagacccttgaccattaagctacagagatgtaggagacagggkctccatgggccttccccaacagagggtgctggctcagcccatggaaggggcatctcacctggcaaagacttccagaagaaagcaagatgcatggacttggccaggcaaaggggatgggacacaggtgtcatggcagaagccatataccctcttaagggtttggggacctgtggctggggaaagaggacttatggctgtgggaggagacccagattgrctcatctccattgctgtgtactctgggcaacctccttctctcacgcaactcatttccttataaatacaacctccagcctcctgtctatccaggaattggccctctagatatggggccattttgtgcttttgtatatcattatttagtttcattttgatttctctttagtttttttgtttttgtttttttgtaaagtatcatttggaaaatgctttcctgacctggcagagaacaaaagcatggattctctctccctaccaagctcaaagaatagggaggaatgggctggccatgtggctgacttctccttaagcatcaagactcagcacaagtaccaagcaccccgcccctgcaggaaggcttccctgattcctggcactacatctggtggccggctctaggccccacactctctgctgcccctttcatcatatgctctcccatctgctgcagtctaaaagtttcctttcccccaagagtcatatgttgaaatcctagcccccaaactgatggtattaggaggtagggcctttgggaaggggggtgattaggtcacgagggtggagccctcatgaatggattctgccttataaaagaggtacaagggagcttgttctcccctcccaccatgtgaggacccagccagaaggcgctgtccataaaccaggaaaccagccttcactagacaccaaatctgctggcgccttgatctcaaactttctgrcctccagaacggtgggaaataagtttctgttgtttctaatctgtccagtttgtggtattttgtgatagaagcccaagcagactaagacaccattctctgcggtgactgtgccctctctcatccccgctggcacgtgagctccctgagaaccgggctctgacctgtttcctcctgtttgccaagtgcctggcagatctcagcctgaaagagatcctcagtaaacgcctagcacatcaaactgaataaattcagcattcatggttagcaaagggctcgagcttctgccccatgcagctccctcgagtgccatggttaggscttcccagcattacttccctgttatacaaagggaggaccaggcttgtgagctcccctatcagatgtggactttgactttcacctctggggatgggctgccctgtgcaggtctgcacctccctctggccttccaaaggctgctgctcttcagattttgccagccatcttgttgaggggtcctgccgaggggcttccccagaggcggttatgctcctaaatgcactggtcccaaactgctgcctcartgagccataggaaccttccctgggccccacccctccagcaaattcctctcccrgagcccctcccttcccctcccctcccagcacttggtggcatctgtttgctggtctgtccgtctagcaaggttccaagctgaaacccctttgccccctttcctaggcagggagaggcctcacattcttycgtgaatccaggggcagcaccaggcgtcaccccctgcgcaggcagtgtcgtgatgggcttggggaccccttagcaggctctcagccacggggtgggaggcgggccagaawtgagtcctggggctagacactgggaaggtgcattaggrcttcagatgtagaggagctgggacctgggagcaggatgttgagatgggaacacagctgtgcccaaggctgcttgtgcagcctggaccccagaacccccttacaacctccaagtgtgggcgacactgtgcctgtgggatcagacctgagatgttggggtgttggggaaatcgcctctgggatgggcctctgaaaacaggtgcctgcagcagcttgtgatgcagagaggcggaaggacttatgccaggcttggagaattggagcccttgagtagagtccctcatcacagtgatgtgtgacagtagcccagctctcatctgtcaggtgggggagtgaccaccatgtccccagctggaggacaagcgaggcacataattaactccagctgagtcgctgcagagggagcatgggcacctgaggaatgastgtggccacggtgacggggtgaggacccaycctacarccccccttcatctgtgagcaggcggccagtgggtgtttgcacatggggkagctgtcgrgatagctctggcccgtgtgctaggaaggactgtcagattcggggacatggctcccaagggaaagtcggtagcgtgggcagctggccagtgcctcaccagccttgtgcccagtgctggactcagcagtgtcccctggacccagcaccccctcctggcttctctacctcagggggtcctggtggcccagactcacacagcccctgaaggaaactaggactcccctctctcctagaggctactcttcctcttgttctgatctgaccccttccccctgctcctgccattgtccctggaccactgcactggtctctcacccctccccacgccctgcccttcctcacttgaataacgaccttcaagtggctgccaggrtcgtcgtccctgtcctcagctctggcgatgtcatgatcaggtcgaagcactcttgagaagccccagggtttaatgggtgcagagcttttctgtttgggataatgaaaacattccggaaatagacagtggtgatggttacacaacatggtgagtgcacttaatgccactgagttgtacacttaaaaataattagaatggccaggcatggtggctcacgcctgtaatcccagagctttaggagayctaggtgggaggctcgcttgaggccaaggaggtcaaagctgcagtgagccgtgattgtaccactgcactccagcctgggcaacagagtgagaccctgtcttcaaaaaagaaaaaataaataactaaaataaagtggtaaaacaaaacaaagggaaactccctatggactgaaaaataaggggcaacctccttaagctggcactggctggctcagggcctaccagaggctgccccaacctccttttccagtctcacccctcgcatctaccattcacccttttagtgctccaacctggagagttactggacttgctgttctaagacatatcctcactttccctggctctttgccttcccttatggattctcaggattagaatctattccttcacttggtgaaataatcatttctacaacactctcctgatgacttattactgctttccaaggccttttacactatctctggccagctctaaagagatggccttatttctaagagcataaggtttggagtatgatagcctgggtttgagtgcaggcttcatggcttaccagtcatgtaatcttgaacttgtcagttaagctccctgaacctgtctttcctcctctgttaaatgaatgctaataacagtatctaccccatggagtcactgcaaatattaaatataaatagtaagtgggctaatgcgtaaaaagaatttagcttatttcctagcacataggtcagtattaaataaatgttagctggatatgtataaattgaaccaaaatctggccttgagtgcagacaaaaacacacactggtaggctggaagggatctgagagatcatctgtggcagtcatagtaggctcccaggtatctggttctctcctcacttagtaagttgcactttgtgtcccttatacttgggtggggccatgcctgtctcatgggccatgtccagtcaatgaggtcaatttaattgctggctgagcctctccagagttttcattttccttccccattagcaactggctgcattcaagatggcggttgttccattagcttgggctcctaggtgtctgggatgtgtcaagtgccccccttgcttgagagaggaatcaacttttcctggggtgacccattgacatttagggtttgtttattgccaaagtatagcctgctttgctttgcaaactctgctgaatgacaaatctgctaactcaacatttttgttttttaagtgaagcatagatgaggtgggggtcacagagtgaggcagtggcaggtctggagctcatatcctatgcctgacatagctggtttattctttcttcgatctctttcctcatcagtctctcccatcattgacctcccatgaaggagactactgagatggactcatttgaacgagtcttgttgatatcatgaattggtcaaacccacgcctcacaggcctttagctaatgaattccccagtggacacatgtctctcctaggggtgctaggccaagttgcttgccaagccatccaccagcacttcacgcctggaccaatgcacccacctctccctagcctccttcctccccattgggtcttcctcctctgccccagctgccagaggcatctgtgtaaagcaagtgcctcttccctctcggcactcccctggtgaaagtgctgcagtgacttcttactgcctgaaggaaagaaaaccacacctacctgtgttcagtgttcccgacgcactggctcaagccagtccgaacccacccatcccttctccatcctgtgctcctgctagtgaacacgatggacctcttctccaaggtgccccgcaacttcctatttccaagccttcactcttgctggtaactcagcctggtgtgccctcccaccacctcagtctcttgttcctctcgcaaggctcagctcaaatgccgcctcctccaagaagtcttggcagaatatctcagtgcaatttgaatattccttccttttttgcgtgacttttgtctctgccattgctcccacttctatcctgccctgtgttatggctttttgtttgaatcttctcttccctcctgaatggaaagctccctgatggccaagactgtatgtcactttttatgcgtcttcagcatctaccatgagacctggttcttcatcacccagggtgcgtttatgggatgaatgaatattctctaactccaggtccaaccctccattacaccatttactacatgttgctaaattatttccatgtctctcacccactccacattataaatcccatgagagcaaggacccagtcttacccatctcatcttcccctacctagctcaggcgcccagccaatgttgaaccaatgtgccccacaaatgtggaatggaaaggagtggcgatggcttggtggcacaygtagttggagtttggtatctcttaagagggcgatccagcccccacccccggagaagggctgccaacatgtgatatttgcacaaacctgcagaaaagagcacccctctcctgatcggcagcccgagtacactttgtgtttgtgaccctgacttttaaaaatgtcacacctgcatatgtggggaggcttactgacagctaattaggaaacgcagtttgtatctcccagtctttgagaaacattttgtaaattgggtaattggctttaatagtgcagaggagagatgtgtgctatggctccatcatcttcaaataacacagtctgcagccggccaagaattcagagtgacagcttcagggagaatacagaaatgccagtttttctcagtattcaggatggacagcctggctctctggagacttttagaagcagatggtctgtccatcaccccggggaaggggtgtgaaaaactcaagatggctggagttaataagctgtttgggacagagctatggatatgactacttttatttcaggctctacccaccagcagtgattgtatctgccaggcagcagtaatttagtccagctaggatgtattaaacacctgtttggggccaaactctttgataggcaaagggggacagaggcgaataagataacctagttcagcagggcatgatggctcatgcctgttatcctagcactttggaaggccaaggtgggaggattgcttgatactgggagttcaagtccaggagttcaagaccagtttaggcaacacagtgagacatgtctctacaaaaaattaaaaaattagtgtggtggtggtggtgtgcacctgtggtcccaggtactcaggaggctgaggtgggaggatcacttgagcccaggaggttgaggctgctgtgagccatgatggcaccactgcactccagcttcagtgacagagggagatcctgtctttaaaaaaaaaaaaaaaaaaaagacagccaaactcagcataccttagttatatctggctgtatccctgaaattctggtttgacgtaagtgtcttgaatgataggagaacactttttaaaatgtaaggcatatatactttgtaccctttcccataatcttttcttgtctctctcaactgtctttacccttctttaatagttccccaggtgtgctgattctttatgtttcaaaatgcttacagcaggcgtttaaggatgtttgttagatgatgcggcctctctgtagtgactacacctctatagcccagaagtttcatgcatgaaagttatttcttgcttatgtcattgtcaagtgcagcttgaaggggtgtgttggttggtgttctgggaagcagatgctcagagttagaggggccctggggaaattcctttgaaaggatatgaagagagatgggcagggtgagccttcagactgtgcggtgggtctgacatcagtaaagggtgtggggaaggaaagaggctcgggtaggaacagtccctggcagcagcactgctctaagaaagttccagctggaccagtgggctcagagatcacctgtagtcaggtcttacactggccagaagtgaggagcccttgttcctctgccatgctcagtccatggttggtggggtctgggaagagggtgacctcctctgaggcatacccaaagacgccacacctggaggctgtcagctcgtgagactgccctccttgggatggtttctctcgtgacatagtggtgtccccttccaggcttgccatagggatttgggatctggggggtttcttcctgtttcaggtccttgcattttttccccactcacactgtggatggaaaagagcacagaatacccatggaatggttttacaggccaacctgggcatggcacacatcgtctttgttcatattccattgcccaaaactcggtggtcacacctaattgtcggggggaggggctgggaaatgtagtcttaccctgtgcccgaaaagaacagaacatggatatgatggagcatggactctggaacctgactccatgggtttgactcccaactctgcccctcactcactgtgtgcaacttggggcaaattactcacctctctgatcctcagttttttcatctattaaaatgtggataataatgggacatggttcatagggttgttgggaggattaagtgagttagtgtatatacagcaattagaatagtgcctggcacaggcaaatgctatgtaagggctcactgtgttattattattactattcttgtttctaaatttaacacttcagtaaatgtttcttgggtacctgttctgttcaaagaatttttagaggtcacatgaacttactgtttcctggacagctcctagtacttagtaggtgactgaaaatgtttcaatgaattagttgcaatgacaaaacaatatagtgtatatttaattcagttggatatggtgctgggctaattttgaacatgatttagcaatgataaatgttaaagtctgttcttaggttcagaaaatcacccacagatgaacagaaagagggaaacttcagtgattgagaaagcaccctgggtgtggaaagcttaccagtttaaaaatgactttctgtctttataaaagtaatctgtattttttttatttaagtaaaagaagcaagtaacaaaaaaccactgaaatctcataacctttaacattcgatgattctcattccagacatctctctatgcatatattataaagaaataattttataaaatgagatcattattacatcctactttagatcgttgttgaattttatttatttgcatataacagaagaaaatgaggaaaagtaaaatagaaggaattgctcaccattaaacaattttgcctttgctacagaaaatattkgtttccaaaatgtctctccaagggtaataaaagattatgaaaagcagtgaggttaaaatcctggcttttaaactacagttttcaattttagatggtattgattaaagcccttctatggaagaagaggaaattaacaatcttacaacttctcttccctcytctgcctcctgcattttatgttccattattatcttcacattgccagttgtttcatgttaaatgggtctggctctcactatcactccttttttaccacaagtcctcctccattcctgagatttatatttttgattcatcttttggttggctggattttatccagtaggttttttctcccctgggcaccaaggaaggattgtcggtgttttgctacccaagataataggtgctgatttagtagtttttactgacagcaagctctgtatgatgtaggagcccaatagaaggtgtgcagactgaagccgcattaacagaagtcaatactcagaatgcgggaggtgattgtttcattcagcttggcattgtggctgggagtgctctgaacaaatcaataaggaaaagacaacccagtagaaaaatgggcaaagttaccagtccaaaagaggaaacacaggctataagcatatgaaaagatggcttaacctctttagtaatcaggaacatacaaattgaaatgtgatatcaaatacccacaagactggcaaaaattaaagctggcaaggatatggagcagtgagatctctaaaacactgctgktgggagtgtaaatggatcaaaccacttagagaacatgcagcaaacgctatgattcaacaattcaatttccaggtttataccctagagaaactcttcatatgtgtgcaaggaggcgcgtatgcaaatattcgaccatcttgcttacagcagcaaccaaacacaatgctggaaacagcccaagggtccactggcagaggaatgaacaaacaaacggtggcatattcacacaatggcatattacacagctatgaaaatgaatgaaccacagctatattcagcggcaaaaatctcacaaacataatgtggagccataagggcaagtttcaggtgaaatgtataacacaattccacttatatgtatgttcggaaatgagtaaaattaaatgatacagtgtttaagaaacatgtacatataaaactgtaaagaaaagcaaagaaggggctggcacggtggctcacttctataatcccagcactttgggaggccaaggcgggtggatcacttgaggtcaggagttcaagaccagcctggtcaacatggcagaacctcgtctctactaaaaatacgaaagttagctgggcacagtggcatgtgcctgtgatcccatctactcaagaggttgaggtaggagaatcacttgaacctgggaggcagaagttgcagtgagccaagatcatgccattgcactccaacctaggtgacagactgagagtctgtctaaaaaaacaaacaaacaaaaaaaaaaaaaaaaagaaagaaaagagaagaaaagaaggataaatgcaaaattcaggcctggggctccccctgggtaaaggagggctatgtgcaggtgtgggcgcagaggtcttcaacatagctgtgatgctggatatactgtctgttcgcattactatttttcatacttaagttattgtatatggaatattttctgtgagtgaaatatttcacagcacattcttatttaaaatgaaaccgtgctctgaagttagactacctgaatccttgacatcaagttcttagtactgtgcctaacacatatatatttttttaattttattattattatactttaagttttagggtacatgtgcacaacgtgcaggttagttacatatgtatatgtgtgccatgttggtgtgctgcacccattaactcatcgtttagcattaggtatatctcctaatgctatccctccccactccccccaccctacgccagtccccggtgtgtgatgttccccttcctgtgtccatgtgttctcattgttcaattcccacctatgagtgagaacatgtggtgtttggttttttgtccttgcgatagtttrctgagaatgatggtttccagcttcatccatgtccctacaaaggacatgaactcatcattttttatggctgcatagtattccatggtgtatatgtgccacattttcttaatccagtctatcgttgttggacatttaggttggttccaagtctttgctaattgtgaatagtgctgagggcacagtatacgttagctagtgtcgcttttctgggcagggtagatggaggtatttgggggaccattctaggtgctacatgcccaaaaaatctgtcctccaaaggctgtttgtgaaatgactcgtagataagcaggctgtaaaactatcctgtatggggatgattggaagtgctaagggtagtttagcctgaagacatctctcggagtcactctgcggagcttagctatctgatttccaggccaatgataggaagaattttctaagaagcagagctggccgaggacaaattagctccctagtgagagagtgagacccctggcactggacggacagacgtgagcagatactgagtgctcctgcgtgggagacccagaggggactttctaacgggggcaggttggacacattagcttttaaattctctttccattctgaaattctgcatggagtaattcccagtttcagatgggttgttattaactctgacattttcttggcatttttacattttaactctcagcaacattttctttgaaatttttaaatcaaaaaagtattttaattctttaaaaatgagatttaaatgaaaatggatttcatctggagcctcactttttcatttgaaaattgattttcatggcttttggatctgttcccatgtttaagtgctgaattttaagagcctatatgtgccaatggtgatttctctgtgacaagtccttayagggaaggagaagcccttggcagtggaacagcagacaggagatgtgaggtggtgaccatgagctacagtagaggaggagtcaaaggaaggtaatawcaaataccagagagaagagggagggagggaaggcagcatttattgagcacctactatgtgctagagccaatctccaggtggcaagactgaagacagaggctaggccagtcatgaagctttgagttattgcatgacagtttgaactgtgattaattacttcctgcctgctggtcaagttgtggccatgccaaccagtcagaatatcctctagaagtgagtggggtttccggtgggggaggtgtggtggggggaaaggagagcatgataaagcccatagctttcttccaggacacagacccccacttasagtggctctgagagcaattcatcaaaaaccaaatcacagaaagacaacttgctgtaaataacttctcagaatgatggttttgcccagtgaacatctcactaaaagctgtcagacagacaacttaaatggggtattgaaaagcttctggcatgttcctggctcaggccagggctggtccacaggaaragaagggtaatcaacagccctttagggggacatcttcacgtgcagcatttgagaagggaaaatgtgaaatacgcataacattgactttcacctgagctggaaggacagatcctgtgaaatggctgtggcaatgtgtctgcaaggagtccttcaggaaactaaaacctagagaagttccccagtgatttggtgacttgatcatcaggtacattcatgcacagtggattaacttggagtgagtagcctatagcgtatatgccaaaacgccttgcttatgagacattcacccacccttcctgaggccagagacaaacactatactctgtaaggacctccagggtcatattggtggttttcaaacatttttgctgctagcaatgaagcctgctytaaaattaagtgttctgtggagctctgatgctgcagctgaggcagttgggagaggagctgctggttgaagtgaaggtgaggagctcagtgcttctttcactgccctatctgctgggctttacgcccctgaggggctgactgtaaaaaactctaagctgatccagcccccaaaattcacctttggtgagctggaaagtccatctatttgggacgcgaatcatgtcaggtaagaagacacagcattagaaattaggataagggaaaatagcatcgaaawtgggacagatatatccatgtgatttattttgttattcactgcaaagttgctccctttaggggagccagggaagcatgcttggtgcccagtacgttgtttctcttgcttttagccaagagctctgatctggaggagacctgggcttgcggcattatcctgggggaaatggtctttttttctagaatgctgttagctttaaccttctcttcggttgagtctctagactattggaatgctgagagactgggaatccagaaatccctctcctaatcctggcaagacagtggacaaatcccttctctctagtcctcagtctctgcatctgaaaatgagagtgtggggctagattagcaatgcctagatgttgggatttcacacaccaagaaggggagggccgtggaacagaaacttacatagtgtgaaaattttttctattttatcatgtcaggacattaaaaacaagacctctctcatttctatccttttgtaacagaaaaatatttcaacaccattcaactacaaaggaccttgtctgtaaattaaggatcatttttcaaatggaattaactttaaggaaaaccatactgtgtcattcttatttttcacattttacctgagtgtatttgctttctatgctgctgtaactgatcaccacaaatttggtgatgtaaaccacacctatttattgtctgacagttctatgccagaagtctggacacagtgtggctcccctgggtcccttgctcagggcttcatatgaccaaaatcaaagtgtcatctgggctgggttcrtatctggaggctcaactggggaagatttgcttccaggctcattctggttattggcagarttcagtttcttgcaattgtagaacagaggtccctgctttcttgacacgtggacctcttcatcttcaaaccaacaatggcatatcaaatccatctcatgcttccaatctctgatctcccctctgctattaggtaaagaaagatctgcttttaaggacttatgtgactacactgggcttacctgtatcataatttaaggtcaactgattagtaaccttcatgacatctacaaagtcccttttgccatgtaacataaaatattcatggaggtaattccaaggggtgaaggtcaatggggccaaarctttgccygccacacccactctggtgaaaattcagtcagataaatatttgggaacgttgtaagattctccagctccaatactggttgtcaaatagtctcagatattttagttgacatatcccagtgttttgtatttgtgagaagccgtgacatcattactaatacagaatcttgcatgggctggatattcagaaagtgtttgctaagcaagcatgtattaataaattcattgttgctaatattatttaatgcaactttgattataaatcctgtggtactgtagtatcgttgtcattagctacagattagaaaaaaagccaaagtcattacagaaatgtattaaaactataaatgattcagtaaatcatggtagattccaaaaaaaaaaatcatggtagaaacaattaaaacatgaactactctgttattatctgctcgtgctctgttgggggtgagaagtgttgctttcaatcaaggaacagggataattaatagagggccccagaagcagtaagaacttaatctttcctccctccctccctccctctcttccttcctttcctccttcctttctctctttctttcttggggaaataaattaacttggccagtttttaaattaaattaaaaattttaaattgaattatttaccgaaaatctgtagtattcaaactccctaccctgatgttgagagctctaagccttctccctggccacctcatccttgtcactcactgttgaagcaagctgggttgtttctgttcccgtctcacttttccacctccttgcctgtattcgtgctgcttttccgcctacgattcccgtctcaagtgttccctcttccagagccctccctggctttccctgcagtgcccacagcctggatctgcctctgtcccacagcaccrgccaccatcccccacgggaggtgactgcgtgccccggcctcactgcctccaccatcggtgagctccccgaggcccaggaaccatgtcggactgagtcctctgtccctgttggcacagacatgggtcacagatcagaggagtttctcaaataaatgaagagggagcaagaaatcctagttcactctgctcccatatagcggtcacttaaggggaaggtggagaacaagcagaaaaaaatgaggaggacacagaatggagagaaagacaaaaataaggagagaacgtggaagtgtagagcaaggaggaggaragcagatgaagggagagtgtccaacagatttgtttgttttgttttgagatggagccttgctctgtcaagctggagtgcagggcgcgatctcggctcactgcaacctccgcctcccaggttcaagcgattctcctgcctcagccttctgagtagccgggtttacaggtgcatgccaccatgcctggctaatttttgtatttttaatagagacggggtttcgccatgttgtccaggctgttctcaaactcctgacctcaactgatctgcctgcctcagcctcccaaagtgctaggattacgggcgtgagccttcgcgcctggccccaacagatcttactgaatctttactgaggcccctctccaagctctggggagacagcagtgaaaacgatgacaaaatccttgcccacctggggctttcattctagttaggaaatcagtcaatctacaagtgaacaaaaagtagacaagatgatttcagataattttaggaactatgttagggcattaaatagggtggcatgtcagggagggaatgggggtgggaaatattttggggagggtgacctgattgatgggaaggagtgagccatgctgagaaccaaggaaattgtgttcccagcagagaaaacagcaagtgcaaaggcccagaggtgggaaggaaaatgcttttgatttcagggaactggaaggaggttggtagggcttcacttggtgagcaaagggaagagaaaagggaactcaggccagattgggagtcagcagctggactgagtggcttccattgtgataaggagtcttaagaaaatgaccccaaacctgtacatartacaaagatgtgattctgtgaccctttaccctcatacttagagcattttccaacagtcctgcctaagggtcatctgactgcgggaatagaactttgctcaatcaattaagacctaaacattttgcaatcctctaaaacagataagatatgctgattttcagtgattttctttctatccccaaaggttgtggttttattgccctgtaggacattaaccagttttgtatctaatttggcactcttatcttattccttttttcagtcccggttccttaaattctcttttgaatccactttgccatcctgcagatctccttattaatgagttaaataaaactttgacatgtgttcactatcgattttcatgagaattatgtttttaacctttygagagttatattgtgataggagtttgggttttaagtgcatggaaagcaggaagagtgagaagaattcattgatgtttgacaaaggaccctcagacagctagatggtggaggggttgaacttgcccatggggaggtaagacacccagtagaagccaaagccactgtccaggggagagatgaccacagggtttgactgagggaggtggggatggaaaggcgctgagtgagccagaactgaatcctgatactcgtcgtgggcccctggcctctttccattcctatgctgggtcgccgtgaactgtttccttggccaacttttctctctaatacggaagctccttggcaggggctgcatccaatttttatgtttcctcaacgtccagccctggactgaacacagagtagtccttggcaagtgtttgctgaatgaatcttctctttagatttatcctcatcatcatttttttaagactgtggtaaaaatatacataacctaaaatttgccattttaaccatttttatgtgtacagttcagtggcattaagtacatctacattgctgagctaccatcaccatcatccacctccaacacacttccatcatccccactgaaactctgagcctgtcaaacaatgaagaccccttccctgctccccccagccccgggcaaccaccatttctactttctttctctatgaatttaactactgtagataacctcatatgagtgggatcatataatagctgtctttttgtatggcttattctatttagcataatgtcctcaaggttcatccacgttgtagcgtgtgtccgaatttccttccttttccaggctggaaatattccactgcatggatacactactgttccattatccattcacctgttgatgggcattcatgttgtttccatctgttggctatcrtgaatgatactgctatgaacatgggtgtacaactatctcttcaagtccctgccttcggttgttttgggtatacgtctagaggtggaattgctagatcatatggcaattytgtgtttaacttctccaggaaccactatactgtttccacagcagctgcaccatcttacattcccactaatagggcacagcagttccagtttctccacacccttgccaatacttgttgttttctgtgtgtttttttaatgatagccattttaatgagtgtgggatcatccttaaaatataaatggccatgaaaaagtgagatcccagggcgaggcattatgggacttttcctaagtgtgctctaaagggagatagctggggtgctggagagaggtcctagatttggagggcacttagcgggagcagagacaggatagtgggtgccaagaccacactcctggagcttacagcgtggactcagggctggcttaaggagactccccaccatgggagaactgaaacccagaaggtttccaygaggaaagatttgtytgttgggctcatgcccctggggaaaagctgtttctaatttggacctttctttctatgtgttgcttcccagtgcgacaacgcaaaagggttgaaagccttctacgatgcrataaaatacgggcckaaccacttgatggtgtttggaggcgtctgtccatccgtcacatccatcattgcagagtccctccaaggctggaatctggtgcaggtaaggtctgagctaccttcttttgtggggaggtgtctttggttggccctcagtcttttgcaggaattattccttgtacaatgtggtttctatgttgcctgggtcaggcctcctggactttctcctgggtgatagcacagcctttcwctgctggcctgacttggcatggcccccacagtaggtctctaaagggcagccctgatgctatcaccrtgtatttgaaggcttcagggctcaccactgactccctagcccagctttcagagccaytgatgccagtccaacctgcctgcccagtgttatctcctgctccttccacttgctccacagcacagccttgccagacaccctgcctttccrcacatgcgccctggacctttgggcctcagagccctgctctcaccgttcccttaaccagatgactcctcatcaattctctgccaagtctccctttcccactgagattctcttttgttatctamgactgcctttgtcctcggttaagtctttcctggtctccttgccarttattcactctttgccctggcagattttatacatcattgaatgctccaccaacatatatayagtctattgtaggtgagactttccagtgttagctgttatttgggatgggaaagaagagtgtagaactatatgaccaccaggggtgagtggtggcccatacacatgtttacttttttgctccatccatccatccatccatccatccattcacctatccatccatccatatgttcacccatccattcgcctaaccatccatccatccatccatccatccatgcatccacccatccacccgttcagctatccatccatccacacattcacctatccatccatccatctgtccatccatccatccacctatccatccatctttccatccgtctgtccatccatccatccatccacccatacatccatccatccatacatccacccacccattcacctatccatccatccatccatccatccatccatccatccatccatccatccaacaaatattwtaggcaacttactctgtgcctggattttggtaggcacactggggatacaatgctgaacaggataggtatggktcacattattctggagcttacattctaggaggaagacaggcaagaagcaagtaagtaattaaataataatattattaaggttgtatatggagggtctgccatgtgctagacactgttcttartatttttctgcgtgaactcttttaatttttaaatccrctctatgctttaggtaccttatccccattttatagataatggaactgaggcacagaaaagctatctaacttgcacaaggactcacagctartaagtagtagggccaggattttaactcaagcagtctggcccttaagataagactgtagtaaggaaacttggcgatgacagaaggaaacagggtgatgagatatatagtgactgccttggggtagtcagaaaaggtctcttggaggaggtgacattcaagctgagacccaaagggtgagaaggagaccactgggtgaagcgcattccatgtcagtgaatggaatagtaaacggaggaaggcascttgtgataggaaaggacctggtgtattcgtggaacagaaaacagggaaatggggctggagcatgatgggtggggagccagggtgaagagagtgagtgacagggtgagcaggagcctgaccacatagaggatctgtttcattccacttgcactggctgaggacttcctctgtgtctggtgctgcatgcatggggtgctggggtggagcccaagcttgcagccacgaggggtggtgggcacaagctatggcaggtgtgatgaaagagaggtggggcccgggcragggcccctcacttagccccgggtcaaggaagccccagggcaggtgctatggtaggtgcatgaagctggctgctgaaggaggagagggcgttggacagctggagacatgggggagagcgccgctgcagaggaaactgggcgtgcaaaagcgggaggtgggaaagtatgtgggcttggggagtgctgagtcattccttgtggccggagcaggccacactgattgtgggtggatgcaacaggaagaggagaccagaaaagcagccatgtgctctggtgcaaacctaaccacaaacctaaccacacacctgaaagccagcatggctcagtgtgcygtgggagcctggcctcatgccctcagggtgcccaggacagctgtggagaccttggaccagtcacttagattctctgggcttgagcttgctttcctgaacattgaggagcacattctctattagttagagccatgtgctgcctccctgagcctcagtttcatcatctgcataatcaaggtagtaataggactgctttcattggtttgttgtgtggatggaaagactgaaaaaggattagagctgtgtctggcacacagttagtgctaactaagtgttctttgtggttagtcctgccctgtctcctcccactccccaagttgagtcccctgattacttgtcattcctggtctttcttgcattcccaccttttcttacactgttcctaccacccaaaacatcccattcttcctatacccagtgtatcaagtgctgcccattctttaagacccagcttaaatgctgcctccttcaggaagcctttcctgcctgctcctagggggctgctaaagtagggccctagaaagcctatcacttccccttgtttaattctagcagagcttgtgcacagcccagtgtcccactccactctgcctgtctctctcttagggttttgcagatttggggggggtggtggtgtttataaatgtttgtctctccagctgggctgtgagcttcttaaggacagaacctggacttttctttttccctgtgcctatcatttcacagtcttcattagaaatctgctcaatgatcagagggatggagggaggtgggaagggatggaaggatctgaagatggacgctttgtccaggcatgagaggctgaggtcccagggaaatcccctgcccagagaggaatccagctgattccactgattctcagtgtcacttggaaccacctgtccctcagaattccctgaggagctgcaggaacaagcacaacgttggaaactcccagcttgcagaccacagctacctggcctctccatgagcaggacagccctccaacctagaggagatgataagacatagaactgggttacaagatggggactgtgttagttatttaccactgggtaacaaatccccccaaatttagtgtcttaaaacagcaatattatgtattatttcattatttctctggttcaggaattcagacacactgaatggcttgtgtttgctccatggtgtttggggcccagctggaggatttgaaggctgggggctggcatcatctgaaggcttgattagggcckaaggatctgcttccagtgtggctcctctccatgtggaggtctccatagggctgcctgagtgtcctcatgacaaggcagctggcatcccccaaagtgagtcacgaaaagaccaaggcagaggtgacaaagtcttttgggacttagctttggaaattgcatactataagttctgctgaaatctgtggatcacacaaattagctcttatttagagaggaatagtaccaaggtrtagtgggaggtaagctcactgggtgctagcttggagactggatactatagtgactaatgtctggaggaaggcaggaactccagttgcccagcaaggggcacttgatgctgaggccctgccctgttttgcagaactcctgctcatccttcaaaaccccggataccacttcctctgtgatgccttccctgatctccttcttttccccctttccttcagtgcygcccattccccgctcaaaaagtaaattaattatttcttcctccgctacaccctgcattcccaatagggggtgatatcttctccaagggagtaaacattggttcttgtggcgaggcaaaaaaaatcttacttttttaatgtataaagcatagatatagatgtagtacacaaacagatctatgcatgcctgtggtattacaatttcaccagggggcaagagtaggaaaaaacagccagaaagacttcttaggmgactaacagtgaaacgaaggttgagaaacactgttctacatccttctatattgtgtacagtattctcttattaaataaatttcatgtcaatgaattgtacacttaaaattggtaaagatggtaaattttatatgtatattttacctcaattaacaaaaataaaatttaaaaaatgggctgggcatggttgctcatgcctgtaattccagtgctttgggaggccaaggcaggaggatggctttaagccaggggtttgaggccagcctggggaacatagtgagacctcatctctacaaaaaattataaaatttagccgggtgtggtggcacactcctgtggtcccaggaacttgagaggctgaagtgggtggattgctcaagcctaggaattcaaggctgtagtgagctatgatcatgccactgcactcctgcctgggcgaaaaagcgataccctgcctctattaaaaaaaataataagtgttgtgaaaaataatttgttctatatgccagtcttccatatcagattgtgagcttcttgggggcagcccttccccaccccttccttcatctcctggttcccagtgtctggcgcagggtctgggctcacagtaggtcctcactgagtactgaaatgtgctaagtgcagaggataggtggacggaggggcctgagatgctgcatggcggagcctctcacagtgtggccctgactgtagggcagggagggcggtggaccatgcagaatctcagcctccacctccacagaatcgctctgcattttcccaggctccttgtgggggaagatgctcacacccagacaatacygccctagcattcactactagacactggggctggatcaacggctgcaactggacgtggatggggcatgctgggggggcttggaactggagggtactcaacagtttggacttctctgaggacctgggaggcagaatggtagatgagcccaagagagtggatttctcccaggcttgtgcagccaggcaaggaagatataagaacaaagatcaggatcttgatctgggagtagcctgggagcctggattcctgcctccttctcactctcaggaaacmtagacccatttattataagccagactctgtggacctcccaagccaccccaaccccaacacagggaggctaagcttgtttccagagatggtgaaggggtggatgggtgggtctacaggtgcccaagggatttgataaatctcttaacttactcaagactgggcttcaaaacagagcttcacaaatggaaaactgcatggaatttgtgtaattgaaaaggagctctggcggccctttttggaggagcaatgcttgctggacagagacagccaggaatgcgtaatcagttgtttctgtttccttgtgtcacaaaaatagggattcacacaccagaggggtgaaaattcaccctggtgctgaaacgggttaaatttaacttttgccttttgcygggcctcttgattcatagctgctgcatagagaggctaatattgttttagtcgtgatgtgagtcacttagccactgggaacctgtttctccctctatatgcaaggaccttcatagagtccagggtctgacatgcaggtgagattggttctgtccctctccaaactgtcagagcctgctcagggtgcagggctctgatctgggcctcatgctgggaggaacccactagggcatgacccaggaaagcatcagggaagggtcaaggtctagacattggagagctgagggtgttcagcctggagagcacatggggcactggggaggagggaggagtccaggcctccagcattgcatggctgtctttgatagattttgctggtctctggtgcaagtggggagaagcaggagccacggccaaagttatcagggagcagcgtttccacctcctgcaagcaagccctgcctctggaagcttccagcatggagcacgctgcctggctgtgaagtcatgagttccctgtgggccaaggttccctgagaagtccagtttcagccaggcctgctgttggggaaatttaatacacagagtaggcatagaccaggtcagtggctctccaactatatgggaagagtcacttacgggggttcttggtaacagtgcaaattctagggctccactctgagcaggtctaggttaggggatttatcagatccctctaggactgtattccccgctgatcaaaaccacagccatttcagtaccagtggctcaggtgactgtgatgctgttggcccctggagacttgccaggccaggagctctctaaggcctgttcatcccccagacacctgggctctttaacaaatgctgctggtccaaaaaactccaactgatgctgcccgtgtgggaaagaggacatggaggcggtcacagggggatgctgccagggcaagtatcccagtgccgctaggatgaagctcacagtccatggtggggcacagtccatggagtgcaccatcaccttgccgttttcccagcccacctcctgycccttcatgctgccagcctcagtacaggctgctggcaggactatgctcattcttccyggtgcagcttgggtgtcccttctttgcaaagccccccatggcctcccctgtgcttcctgacctgacctgcacatccctcccagggtgtttgctatgtctgcccacccccggcctgcagctgcctgaggttagaattgtgtctcattcaccctgcccctcggcctggtacaggcctggcagtgatgccagagcagtgctcagggcgtatttgctgacggagagccaggtgcctgccttctaggccttgggttggtcccctaacaaccaagggcacgtcatcagagtgtgccagacctaaagtcacccaaggactctccagctgcagcctcttgttaaacggacacagagggagccctaacacagccttgggctcagcctcagcccgcatctcccatctcaggaacccccgccccctggttttctaactgataagtttcctttgcagtttttttcagtcccacccagaatcctgtcctcagagacctaagggtggcttgtgtttgcagtttttggggcagtcctgcagatctcccaccagcctggtttgtcctgaaagcatggggcctgggaaaaaccaggagaatttggagctgggtggggaagatggagacagagcatgggaaaggtccaagagatgctagcaagagggagttagacatcctcagagaccaggaccacactccttcctgcttgggagtgagattatcgcagcttcagcttgcagacagaaatcrtcttgctgatgaaaataaagtcagattcctaaagggataaagggctgctcgtaggaaaacgcaaacactatttcctcaagaactgcatcccacagagcttgtcctttaaaaggcagccgtggcagattattaaattgtagatgcatttctcccagmgctgtccccagccgcccctcgacagcccaccctgccttgtggcccaccttggcactccccacgaggaccttcctgggaaggaacatttcggcttgtgtcatggrgctgtctccttggagaagttcatgtgagggagtggaggcaaggaggactttcagatgggaggatgttgactctatgtgtgtagaggtattggcartggagtcccaatacgtttaggacttgatttctgaaaactcgaaagcatgcctggttttgacatttaaaaaacaaatcagtgagaacccccaaatcaggccttttgctatttactgaattctggcatcattctaaacggtcagtcaatgccattttgtttcataggaacagaaattttgtgatctgacatgattttctcaaatgattattttattaaactgtaggctgtctgagaaatcaaaagattgcttgttgcttagctgtggcttgtggaatttgaggtagattcatggaatggcagaggtcgtagaggcttagcaggcattaggtccagtctccctgttgtacaggctgaaaaacagagaccagatggggtaggggccttgccaaagtctcacagtaacagcgacactgggctccgtggctcaccctccagcactttgcagcatgtgccatggtctgattttctctcccttagcctcactttcctgttatgtaaaatgggaatagcaaacctgccttctatgttttatgcagttgttttttctccaagggaaagcgcttttataaactgtaatccagtagctgctgttatgatgcccaggactcctttactagaagcagatctctgattacggccattggagtttaaagctttgcatggacaacagggttttttactttgacactgcagactctgaaaataagragtcagggatggaatgggggctcttcagcaagatgctcaaagtacacacaacgtctgcctctcagcccccaacagtcaaaacccacccaggccagaatcccgccacaacctggcccatgtgactgccacacccttccacagagcacgcaagtgagcctgcagccttgattggaaaccatttggaagtagcagtacgatgaggcacagctggaaactgttgctgctgctctctaagaaagagaatagaggccagtaatccagcaygggttggagccatttctttgcactggtctccaggggggccatttagcacattaataatctatgagatgcttccaccttctggattcattaaaaacaagaagaaagggaagaggagaaatgatgctaagggcatgcactatgggccaagcagagagggcagaagagaccccaaggacctggggactttggagagtccttcctggctgtcatcagatgcccagtgcagtcaagcccagtgttgaaagtgggcagcatgtcacacatgaggtgaggaaaagcttggtagctttttgtttggatacaattggtagaaggaagaaggaacccacagaagggttttcaggacagagaagtctggtagttggcttgaagcgggacccatggtggccatggcaacagcattcctaggacacagggctgtggggcagctgaaggccactgcaaaggccagagggatggagaggggaacatgtggcaggctctgtggtggacaaagtgctggctggtgactgcccctcccacctcatttgccccaaatctcccagctccagcacccagagtcccttgaagctgctcagctgctctgtgctctttgaaggccccagccttcccctgagtggtcccccaagcctgcaggcccgtcctctccttttcaccttgaaaaccacgtccagcctgtgagagctggcaagtgagttgctggctcttctgagcctctgggcatgttacgccatgtgtccagcatcccttgttacaggattgtctctacaccacagtgtcatcattgtctccatttctgcccccccatttgactgtggtaccctaaagacagtggacatgtctgattagtctctccatgcctggkgccacttacagggacccaataatgtgtgtgagggatggagggggaggttcattccacagctttgagttggcctggggtatcactgcccttcatgatccaaacccccactcctttggtggaaggggtggagatgtggtccccscatccagcctggcttgcgtggatcctggcagcaccctccgatcttcaggggaagagaggttctgttyttactcattcatccatccatccaatcattcattcattcactgactcatgctatatttattcattcattctctcactcaacaagtgcagcgcctgctgtatactctcccaggctctcctgaagcagtgcaaatccaccacccaacaccaccaccccaaaagagggagacatggcaaagaggcagtttgatgcaggagactgaacagaggactggaattccgaagctccgggtcattttccctctgatgcctctcactgacagagggaacttaggcgaattagcagccccctcagagcctcactgaactcacagtatcaaggaggtaatcccgtccaccctwctggggctattgagagcattagatgggacagggatgctggagcatgtgggagcactttgcagaccatcaggcccactaagatctcaggtggtgatgttaccgcaactgtgatgccaacygggccctgaaaatgtataggtctccatttgtcttcagatctaaagttgtgtggatgaaattaactctcaccgaccatgaagatgattcagaacagtaaaattaaaacagagaacttacaggagaggcgaaagaagccccaggcagctgttagagggcacacacactctttctggttttcagagaagcagaggtaggttaaagaagggctggatgctatcgagggcagggyggttcccaatctattcctgcaaggacataccccatgtctttcctgttggcctggtgaaagattcaatttaaggttctgacccctatttttaattcaagatcatggtctctaaagtaatatcagttcccaatgtgtaagtccagtggcctcattgtttatgcrtctttcaccgccagccacttcaacccttttctgggaatatgtgggctgtaaataattcattctaaataaataaatcactcgcgctacttacggtacagctggtgctgctagtgatcggcacaattgtagattacacagagttgagtctggaattacagattgcatctagaaagaactggagagggaatttgaaaatgagctccctctggggacaaacatgtaaaatgggattaacaccarcctaataaggttgggatgagagatagaaataataaatgtgtcacacagtgctgggcacccagcaggcatgtaatcttcttcttcttctttcttcttctttcttatttctttttcttygtcgcctttttttttttttttttttttttgacagtgtcttgcagccttgacctcccatgctcaagtgatcctcccacctcagcctccctgagcagctgggactacagacacatactaccacgcccagctaatttaaattttttttttctttttgagacggagtctcagtctgtcacccaggctggagtgcagtggcrcaatctcggctcactacaagctccacctcctgggttcaaatgattctcctgcctcggcctcccgagtagctgcaactacaggtgcccgccaccgtgcctggctaattttttgtaattttagtagagacggagtttcacagtgttagccaggatggtcttgatcttctgacctcatgatccgcccgcctcggccttccaaagtgctgggattacaggtgtgggccactgcacccagccatcaatattattcttaaaacatcattcctgtaattcatgagtgaaggttactattttgttgaggaaaattgactaaaaatgggctttttttatggcagtggttctcaaacttcatgagtatcaagatcccctggaaacttggtaaaatacaaaaacccactaggcatagggtgaccaatcatacctgttttgggattgagagtgccccaggaagtaggactgtgagtattcaaaccaggaaagtcccaggctggccgggacaagttggtcaccttcgccagctctcgtcctgcttctaggcgcctcatcctctgtgctgtgtgttagcaccctgggtgattctgaggcacagccatgggtgggaaccactgccttagagtgtgagactgggaagatgcctgctgagccgctgggcaggtgctctgcggacagacacacgggtgcatgtggtggcatggcactgactgccccgtccmgtgttgtgtttggtaaggtgtgtggtgctcacctgtgcagatgggcaaatggagggccagagagccaacataccaataataccgggtacgcgtctcaggcttgggcagataggctggggttcacatccaggctctggtgcttgttagctggtgcctggggcaggttgcttagcctcttccagcctcggttcctggtctggggcttggcaktggcattatactgaccctgggtgctggtgcattgccttccttcttcctcctgtggccatccactcaaggacatagtcacccaggtgacatcttggcctatctstgcaggtagagacagagccctgggatctggggtcacctccatgggatgagctatgtggtcttgggatatctcttgctccttgtgggcccctgtgtaagaggagtgggttgggccagttgatgggccttgataacctcgataatgttgtgtcattatgacctgtggctcagagccatcagtgcctgccttaagcctggcatcgtccctcttgggcctctgcatgtgatttccctgggctcataaggcctggtttcccctccatgtctagaagctgtgagaaggaaccaggcaagtgctcaggggctgaggccgctcacacatgtaactccacacagagtagaggagcagccttgcagctgtgccaggccttcagctttaatgtctcttgatctccgccagagctttccaggtgtaggayaccccttctgcaggaagtgaggcccagagagctgatgtggcctgtgtaaagtcatacctcaggtagggcagagagctgtggtgccagcctttctggtggccttccccgtctggtcctttcccctcatgctaaggcatagaacctgctccccacagctcaagagctgttgcccatgttgttctcactgcacgatgccctttctgctccccctcctccccggctcagtcctctgtatttcctgatatttagttcaagtcttacctcctcctccaggaaggcttcctagtcttccccaaccctggtcccagctggaggaggtacccagcgttttcctcacttcctttgttttgcccattcctcaatatattacaatccctgatgaggtttcagtgtcacctgccaaacaactccttcaggcccagacagtccttgcccatctgagtcttagcagtaccccaagggccttgcctcaagtaggtgctcaggaattgtgactggacacacctgtagggcctgttaaaaaactaatttgtcacatgtctatagcctttgccatgggccaggcatggttctaaacactgtgcataaattaactcattcacttcacatgccaaccctaagaggctgttattctcctcatttcacagatgagaaaactgaggcacaaagaggttgagtgccttgccaaaggattgcccttcttaaatggctccggagtccctgcttgcaaccgcaagtctacactgcctgtcacacagtatcatgtaaccctcactgcactrcttggggttgaagagcaggcgttgtcccagttaggcctgttctcagattggggaaaataagattcaaagaaagtagagtctggccctgcttcctgctgcaagcaggccacaaggtgaggtctcccgaaggcctctaagagtggcctctctgggggccatggaggctccagactccgggtctctgcctccctctccagctgtgttggcgaggaacttcctgcctgtccatggaggacccaggcagtacgtgtcccctgacacaggctgtgttctccctgtaaatcattcatgacccccacacacccacacatgcacacacacatgcatacatagcacttttaaacttattactcattcagtaacttgtgtataaaaaataaatgattccttcaaactcagaaaatagatcgactggttgttggtgaaaatcaataactatgctaagtatttcaagaatagtacttatagtcctactctggatgattttataaagaatgagctgattttttttctaaatagagcatagtctacattagttgtgaattatacagaaggcttttgctttgaatctgtttcctaagatgattacattatttattatttccatgatgaagagattgagccttatayagtgggaagggttcaacttgagaaaaacaatcctaggttagataacgatctagacattcataaatgctgatttaagcataattttctctattttccccatgttcccataaaagctattacatagtactgtcttagcctcttctaacatgacatgttggctttgcaagtatgagggaatgacttccttcacatccggrgtgtcttctgagactctgggcccattcctagaggattgggcacagggacctttggcacagcaaagctgttttggcccaatcctctggcccacgctaacaagaaggcttcagcaccacttgtttgggaagcgtttccagggcgtgcctccggtggatgcgtccgtaaccggtaaccctcgctgcccacagcatgctcacttcctccttcagtgcagtcttgcctgatagttactgttctctctgtgaagtcgaggcagcgtctcctttgtttgccgggggaaccttagagcccagctcatggcccagaatccaggagaacctctgtgaatctttggtttccattttggttttcggtgctctcaatctttctctttaatgtaagtagcatcatgaattcatagattttcaaaaatatattgaatgtactgtatttcagtaagttggagacattatttttcatgcagacagtgtttttgctgctcttttttttttttttttttttttttggacagggtctcgctctgtcacccaggctggagtacagtggcatgatctcagctcactgcaacctccatttcccgggctcaagcgatcctcccccctcagccccccaagtagctgggattacaggcgcacaccaccatacccggctaatttttgtattttttgtagagatggagtttcgtcatgttgcccaggctggtctgaaactcctgacctcaagtgatcctctcacctaggcctcccaaagtgctgggattgcaggtgtgagccacaatgcccagcatttgctgctctatttatgtttctacctttcccccaaaattctcctccaattttgttattttgaaagttactttaacctgcaacaagaagttaaagtacaatgaacatcatttaccctttatctggattgacagttgtttacattttgccatatttgtttttgcttttcctctctttccctgcaccacccccacacacacgctcacacagtcactgatttttttgttgaagcatgtgatattagtttgcacacacaatgacacttcacccctaatacattagcatgcatctcctaagacaattatatcctcttacataaccctaatataaccacatctgaaaaatttaacagtgatacaataatattaccaaatatatggtccatattgagatttttccagttgtcccaaaattgtccttattggaatttatttggacacaagcaaggaacatgcattgtctttgttgccatatatttttggctttcaggacagtgatcttttttttcagaaaacccaagccagttgttttataaaatgtcccacaattgtcatttgtttcctcatgattagattcatgagttttggcaagaatactacattttttatgctgtgttcttcccagtgcatcgagtcagggggcccaggatgtcaatttgaactattattgatgatactaaatttgatcacttggttaaggtggtatcttccaaatttattgtaaatatacatttttccccctctgtaattatgaagtaatctatggggtgaaacgctgagaccgtatgactatcccatttcctcacaagcttttactcaatggttttagcatcaatttatgatgcttgcctgcctcagtatcatattggtgttgcaaaatggtaattttcttttctttctttttttgagagacagtctcattccatcacccaggctagaatgcagtggcacgatcatagctcactgtaacctcaaactcctgcgctcaagggatcctcctgccttagcttccccagtagctgggattataggcacatgccaccatgccaggctaattttaaaatttttttgtagagacggagtctcgccatgttgctcaggctggattcaaactcctaggctcaatcgagcctcctgcctcggccttcccraagtgctggggttataggtgtgagccactgcacccaacctcattttctaattatattccttctacatttaagcctgcattcttctctccagaacagctttcccttttttgactctttcttctcctcctcctgcttctttctgtttctcttcccctactaatttgagcacttaatattttacctgccttagtcttggaatcagccattcctccattcctccattccagccattcctccaaggagccctgattcttcctggtaggaaattgtgttaagaaaccaacatttgggtactaggtatacttgttgctactggggttcattccttcacggttttttttttcagtggaatgagcttgaaaatataatttttaatatctttaaagtgtttaaactgtaatctatgaggagataatcagacaaatatgggtcattctataatttacctggcctgaattcttaaaaagtccatattgtggaaaacaataagaaaaaccatataaagccaacctaggcctgttgtaatcaaaaaattaaaaaaatgccaaccaaaagcaaggcgtgaatattgactggatcctgaatttttaaaacaaaagggcatttttgggaaattgaagaaatttgaatatggactacgcattagatgatactgaattattgttcgttttcataactgtgataatgacattataatgatataggataatttcattctttccaagatgcactctgaactatttagttatgaggtatcatgatatttgtaagctaatttcaaatgcttcaaaaacatcattaagtgtatgtgtgtgcatatatgtatatgtgtgtctatgtatatatatatatatatacactactatatagtatatatataatactaaatataatatatactatatatttaaaaagagagagaggaaagcagatgtggaaaatggtgaatctaagtgaaagtattcctcatgctattgtttcaacttctttgttttaaatatttttatttaaatatttttggrtttataggaatgctatacaatgttcctcgtactattctttcaacttctttaaatatttttcaaaataaaaagttgtgaatgcgcctgtgtgtgtgtatgtgtgtatgtgtattttgtgtgtatgtgtgtgtgtgtatatgtgtgtgtgtgtgcatgtatatatgtgtgtgtgtgtatgtgtgtgtgtgtgtatgtgtatatgtgtgtgtgtgtgtatgtgtgtatgcgcacacrcacgtgtgctgggtggtgggatagtggagaggaagaatatgtcctccttggctggacagtgaaaatgtgtccaaaagtctctttacacatttttctccatgtgactctattagaaacttaatatattcctagattcctttgtcctggtttgttttcactgtttaggggttgattttttttctccttgttgattaattttattttaaaaactatacacaacttttatatgattccatagtcaaatgtatagcagagaattcttggctccaatctaagctctctccattctgttccaygccatccttatataatgtgaccattgttattagtttttaatttatccttccagtttttcttattgaaaatatgagcaagtgtgtgtgtgtgagtgtgtgtgtgtgtgtgtgtttgttcctcatttcttctttttatgcaaagggagcatacagtctacactcttctgcaccttgcttttttttttacttaattttcccagatttcactgtattatcactgtagaaaggcattcsttattttttttttcacagatgcacagccctgctttgtatggatgtactgtagtttgtacagccagtcctctactgatggacatttggattatttccaatctcttggaataaccttggccacattgtcacatttgtgccagtgtaaactgggtatgaattcctagaagtggaatttctgggtcaaaggataaatgcatctataatttttctagaaaataaatctttgttaagaaaactaatgaatgaacttgatttaaaagagctgaaagtaaaaggctaatatctaaatggagacataaaacaattagaataaataaatctctttgtgaaagaggctgatttaaaacctttctggtggcattatctctggttcagcaattttcattttcttgcccaaagacagaatactttctctttggtttgtaaattaaacatatggctcacgcctgtaatcccagcactttgggaggccaaggtggatggatcacttgaggccaggagtttgagaccagcctggccaacatggcgaaaccccatctctactaaaaatacaaaaattagccaggagtggtggtgcatgcctgtagtccaagttactggggaggctgaggtgggaggattgcttaagcccaggaggtggaggatgcagtgagcagagatcacaccactgcacttcagcctgggcaacagagtgagaccctgtctcaataaataaaataaaaataaattagttaattaaacatataattactaaatcatgaaattttagagmtgaaataaaaactacctagaacagtcttcttcaggaaaccgaggcccagaaaggggaaggaaggaacagaaagactaagaaaaaaaaccaaattgagtccaattccatgyaatttaataaacagtaagtgaaagagcytctttgtaataaagcatgatgcttgttttcartttctacgaagagtcaaacatagaactgtactattgagatccctggagataccctatcagcagcatgtggttcagatccctgagtgctttgctgtcacagtgacaactccttcaacagaactcggtgtcaatggactttgtttcacatcttttgtgttattctagggcatttcagtgtagtcatgatgagacactggatcagctggagggtttgagtggctgtgggcrtcctggctgatgatgtgagtggtcatgtttgctcaggatagtctgaagttacataattgtggcactggaaggattctgtttagattctgagcaggcaatgtggagaagmgaatgggtttagccctgccagccatgaacttggggggcaagactgggcaaatcccttctttctggtcctctgtgtataaaatgaagagttggacaagcccagaatggcacataaataaatggcacccatggtattattttatccttctatgctaattgtagacataactaatagatcactaaatgctcattcttcactcccttagcccacttctcagtagcccccatcagcccactggtgatacggcataggttcagccctttaccacagctggcctgaatggttacttagggttagcaggtagaatacaggatgcccagttaaatttgaatttcagatacacaaaaaggttttttgctttgttttttaatgcaagaatgtcccaaatgttgctaaatctggcaaagctatcgcttaggccatttccattatttgtttttttttctatgtagctgatttctcttaagatagctaccctctcttcttgacacttctgatagtgcctattccccagtgcccagataaaagtctaactcattctgtaattgtttaaattcacattatgacctaatttaattgaaggtgatagagatttgggtaggagacrtttatttctaaggaccatatattctggtaaaaaactctttgatgaacctgtaatcccatgtatccctgacgttatcattttcatatcactttcttgactctgccaatgcaagtacaacttgtattattaacttaattagtatgttcccttaaactgactcataattttatctaaatgccatgaatgaaaaatcagtatcatttactaagaaggtagtataaaagcaaattaaggaaaagcatgtctcttagggtataaaatagtcatctgggactcacttgaagtcactgagtatgctccctgggatacaaagcacaccactgactaattcaactccctgctgatttgggaatcccctctgtgactctggcagatgatccctgaggatcttcttgaatacctccagtgctggggaactcagtactttgcaagattttgattcactcttgaataccttactgtgaacggtttcttcttcatattgaccgtatcagcctccctgaaacagttacacatggaccctggttttccctctgagaccccacacagtaagtttgctccctctgcattcatttattcaacacatagttgagtgcttattctgtgacagtttggatgcaatgacagtacaggtgataaggtctgatggaggtgcagtaggggagacaccccctgcgtagactggaggtaggaaggtgttcagaaaggctttttcagaggggagtgagggagagcctgctttgggaaagagaaggctggagtgagggggtgagagaggacgctggagcaaaagaggtggagagggagcaggccaagtgggcctcataaccctcatctcctcatcttctattatagcactaggactcacttcctataaaacatgttcatattccaagttctcagtgtgtttacttatttatttttgaagtagggtcttgctgggttgcccaagctgaagtacagtggcactatcacggctcactgcagaattgacctcccaggcttaagcaattcttctgcctcagcctcccaagtagctgggaccacaggcatggccaccgtgcttggctaattttatttttttccatagagatggggttttgccaatttgcccagactggtctccacttcctaggctcaagcgatccgcccacctcagcctcccaaagtgctgggattcmggcgtcagccaccgcacccggtctcagtttatctttaacagagccctggagagttagtcagggcaggacttattctccccattttacagttaaggaaactgaggcctagcaggttggtggcgggtttgcagctgaccagaggagctgggtctgtgtgttctacaggcacacagcggcactcacttccgggtgctcttgcccatgcgcaaccccagccccgccccagccactgatcctggatgaccccctgccccatggaataaaacttctcrttctgggaaagcatctttgaatctttgatcttgactcagctaagtttcctctggactgaccatgaagcacatttcagaggtgtggagtctcgtgctccactttcttgcctgtggaaagcgttggctcacagggtaaactgaacctaggatgaccccttcttctcgagccccggtgtccctgggattggggctgtgaggtgcccagtgactgccacactgaaggccctcccatgtcctctgagtgtcagcgggcaggtggctctcaggcctccttggcaagcttggcctgtctggttgagtgattccttggtacgagtctgccgctcagagctttgcctgagctctatctactcaaggggatggggcgcaaaccctgttttcctcagccagagaaaccagcactttccttcctcctctgttctgttttgtgtgacaactgggtgagttcctgtctaaagaagacaagtgtgaaggcattttgtgaccctcctgtctccctttcccctccatgtctcccatggctacagagcaaactcacagacagccctcaatgagctcatagagcagtcagtgaagtgggcctggctgcccatcacttctcagtgcctcaccacaaagggaagaaacagtgctgggagaactgagggagagcagggaaggctccctgkaggaggtrtctgtgagtaggcctggacaaatgagtaggaagtatgatcccagamgtaagaaatgctgcatcctctcccactcaaagactcgagctggggccccagcacccccgacccctgacagatgtgatttcaacttgtggactgatcagaggtgccatattgacatgaggagacatgatttctgcagtgaggtaattaaaargcrgttggcttcacagctgtgatcacacgagaacacttcttacccctaaagacatcagctgaaagccaagtgcaaaggagccgaggaaaccaaagaggcttctaatgtaatttgttaatttcctgcatttgtcacctgcacagctgtgaggggaaaatggaacattttaccagaagtttaagagaaaattaaagacatacattctaattgtacacaattagacaagcaatacaatcataattatttgtttaattaacaaaccattttaaaataatagattaggatttggacatcctgctttaraatgatgtccctgcctggtggcagccacttgagtttgagcaaatcctttccttcgctgaggcttctcatctgtaaaatgggtatgctcctcccctgccttccctagggaggtggaatattgcaggaaagggctttgtaaattaaaaggccctgtgtgattgtaagaaataccatctaattctcctaacttagttcttgtaacttttaagtctagaaattrtggtctactgtaagccatcattaattgggcacttgtgctattccaaccctcacgacagccctgaaatgggaatgtgcctgtctgaccccagtccatttacagaggaggagactgaagttcccaaagttggaggagtcttctgaggttgcacagggaggggcggaggtggcattcagacacagcctgtccaaactgaaacccagcattcttacccttatgagccacactgctttctcagcatcgacttggttttgccatttctctaatttactcccatttttgacttaaaataaaaggatttgcggaactaatagttgttttccaatcttctttacgtcaaataataatagaaatgttaaagaagggagtgaagaaggtaataaagaatcatagaatgccatatagcaaaaacaattatatcttaaagagcaaagcattaaatgacttcacaatttatcataataaataaatgctgtctcttaaactgggtgataggcagctggatattggttttgctattattctttaaaagtatctaacgtgcttatgtatgtagtttctatttgataatagaagtttaaaaagaagaacgtccaggatgaagaatgtttttaaatatacgtacgatttttgtttcatatgttttcattggaccatcttagagaatcaaaagcatactaacccactgatgaagtattattgttttttcttttaaataaattttattttttcttttctttcttttctttttctttctttctttgacagggcctcactctcgctcaggctggagtgtagtggcatgatcctggctcactgcacccttaaatcctaggctcaagcggtcctcttacctcagcctcccaagtagctgggactacaggcacccgccaccatgcccggctaattctctcttcttttaaattgccctggttgctttctagtcttagcctcagatgcctccctgagaagcagcccagaaaattggagcgaggacgtcattctaagaaccaaagtcccaaaccctagccttgccatttgttaacatgcggctttgagtaagtcacctgattttgagtaagtcacctctctgaacatcagtttccttatctaaaaaatgagggtaataataaagtctactctactgatatcatgggtttttgtgaagatcaaaattagactagagaagtaaatatgttttgggaattgttaaatcacagagaagaatcatagcactctgcagaatgagcagggacttgtgacattagtctccctgctctgccagttgcttgcggagtgatcatgtgcaagtcacttatcctctccgaggctcagtctcctcatctggaaaatgcagatcagaatcacatctacttcatagggttgttttgcacattaagtgaagaagtgaatgctaagcccttcatgcagtgcttgctccacggtacgtgctcattatttcataatttcaagaagtcaaaatatctaagctcaggtcccagctttgcctcttttttttcctctttttgagaaggggtctcccctgtcacccaggctggagtgcagtggcacaatcacagcttactgcagcctcaatgtctcagactcagttgattctcctgcctcagcctcccgagtagctgagaccacaaactcgaaccacaatgcctaattttttgcatttttttgtagagatggggtttcgccatgttgcccaggctggtcttgaactcctggcctcaggcaatcctcctgcctcggcctcccaaagtgctgggattacaggtgttagccaccgcacctggctrctttgcctcttactagctatggggccccaggcaagtcactatacctccctgagactcagtttctcccacaggaaacaaaggcactaatgtctcccttacaaattgtcacaagttcccaataagaatatgctgagtgcagtggctcacacttataatcccagcacttttggaagccaaggcaggaggatcacttgaggccaagagtttcagaccagcctgggcaaaatagcgagacccctgtctctactaaatataaaaaataaaaaaaatagccaggcatggtggcacgtgggtataatcccagctactcaggaggtagaggcaggaggatgcttgagcccaagagttccgggctgcagtgagctatgatcatgctactgtaccccagtctgggtgacagagtgagaccctgtctctaagaaaaagaaaaagaaaaaaaggactggccacagcagggggtggtaaaagctgaactgctgtgcatttgatgaaaaactaaacctcattaacagaaaggagaaatgattgttccccaagaggttctagcccaagctctctctgactaaagagatttaaaatcttacagccagtctatgcacgataccccagaaggccttttgttggagtggggcttccagaactcactcaaatgccaggcattcattttcccttgttaacttgggaaatgctttgcagccaccccgcatcacattaatctcaccggcatctatgttgaggcactttttgtccaaacagtttttcaccagggcttgagcacagcggcgacctggcgcagacctgaagtggacccgagttcccaacacacacagcctggggcctttgtatacatcctggcactggccacaaacagtgttttgtcagaagcttcctgagaaagttgcgttccattcatctcagctgaaaggaaccctagatgacaaatacctccctcatttaattacagaaacagtcagcaaagtcgtggaaaaagattaaaccaacagagaaaagagcaagcctcaatcattttctcatccctttgcatttggcctgagttccttacctaggacttagcaactgtggtcccccctgcccggttatacctgcctcctgaaaaaaatggtttatttttgcagagaagctaaactcggatgccccaaaacaggtgaagaatgaattgcatttaggcaagaattcgtcaatgccttggaatgtcataaagatcctgaagctgggagatgagtttacatttttcgtctgggttcgtatctgcaaatggaagtgaggcacaatggcagttatctgaataaatcagattaaataaaacacacacccacacaagaccaagaaactccttaatcattttcttcaatgttcgcgaagcatagatttttgtggttgcagagaacctttgaaatctttggtccaatccatcactttcagagatgagaaaaacagacatctaaaaggggggaaatgacttacccttgttctctcagtcacagggacagggttaagcctaaatgtcccggctccstaaagaggcctcgtagctgcatgagctcaccacttctctctgcattcaggtgctgcttgttaaagtgactcatggttcagtatgcaggccctgaacgctcatgaaacatatcacggcaggctagaggcctccagctggagagagatgctcatggctctcttcccaccccatgctgctggttaaatatgtctcctccaaaacttgctgtgtttgagaggccctggaagccatggcataaattgttccctccctggtctactggatgacctttctgggccacagttttttcaggtataaaatggatcataatttctaccttgggtaatctgtctgaaagtttttgttttgtttggtttggtttggttgagacaaagtcttgctctgtttcactcgccgaggctggagtgcggtggcatgatctcagctcactgcaacctcttcttcctgggtttaagcgattgttctgcctcagcctcctgggtagctgggattacaggtgcccaccaccacgcccggctaatttttgtatttttagtagagacagggtttcaccatgtcggccaggctggtcacaaattgccgacctcaagtgatctacgcacctcggcctcccaaagtgctgggattacaggcatgagccactgcacctagccctgtctgaaagtattaatcaccaagtcagacgtgtgttcataaaaactctcctttggatggcttagactgtggctggccgattgggtggttgggtcatttctccattcattcatctatccactgtcaagcaggctttactctcaggcatgttagagaatggattttttttttgagtgagtgtaggatgaggaaataaaaacaaaaatcctgtcccccaggaagattgcaaaggatcccccgtgtgaacagactctccacaaatccagtatctatgaactctctggcaatcataatcacagggaatgcaggggactttatgcatctgtaaagcttcagagtccacaaagttcttttacatcctgccatcacccctccaaagcaggcagggcagagcttacaatcttagttctacagatgcaagaaggactagtggcctaagtttgcacagctgggaaaagacagcgttgaggtccaaatccaaggtctttggagtccaggggtctgaatcacactcagctgctgccygtctttgccaggatgtctctgggattcagactgaggggcttgtatcatttctgaggggctgtggtggtgaggatggaggcagtatgacttaacagtactggttccactcctccatttctaagttgcatgatcttggacaagttccttttttctttttatattgtggtaaaatgcacaagataaaattcgccattttaaccattttaaagtggatgagtcattgtcattgagtacattcacaacgttgttcaaccatcaccactatttagagctgaaacattttcatgctttcttgggcatgaaagcttttgtgctttcgccccaatttgctttgttgggcaagttttttaacctctaagcctcggttttcttatccatacgattactaacggcacctgccacagggttgttgtgaggatcaggtgggataactgggaagacttggcatagataaaaggtgatgggtggggggcagttatactaaatttgtatactgagaactaggttataggatttggacaggactatcttgacgctccaggatgaaggtcaaagctgcttcaccttgcccatatgctggcttcaaggcaaccactcatagtgcttaattctttgtgaacttggtccttgacaccaagattctggaggattttgccactcctctggccaggtggccatggatagttcaggggagccatcaggccctgtggtctggtcgtagattgggtagtacctggatgccatcattatcagaagcactcaggtcasttcctggggtgggagtgaaagaatgagatgctatttaaggatcttctgtgggccaggatgtgctcaagactccctgggcaactgctcaaaacaaagagaatgctggtgatccaggtttagcctggctacagactggggcaagcagggcggtgggcaaaaaccccattcagtgcccagagctggccagtatgggatgagctgggcagtcttatccaccagcccccaggggcatggcagcaccaccacattagagagcagtttgatggtaccaatcatgaaccttaaaaaccttcacaccaccttgtggtttaaatggcatctgaacaacgtgaaagagggtgccaggccctgccacatatttggttaagtcagactaaatttattcgtgatttttctaatacttttactaaactgacttgaactttatttttgcaatatttgagaacatatggtttactaaataaataaatggcataaaccaaaaatgaaaaaaaagggtatttggctactcaataaaacatttggtacccaataaaacatttttttagctttcctttgaaactatcaaaacatggaaaagaagccaggcacagtggctcacgcctgtaatcccagcactttgggaggccaaagcaggtggatcacctgaggtcaggagcgcaagaccagcctgtccaacatggtgaaacccccatctttactaaaaatcccaaaacaaaaagaaattagctgggcatggtggtgggtgcctgtaatcactgcttgggaggctgaggcaggagaatcgcttgaacaatcgggaggcggaggttgcagtgacctgagattgcaccactgcactccagcctgggcgatagagcaggactccatctcaaagaaaaccaaccaaccaaacaaataaacaaacaaaaaaacatacacatacatacactctcaaggaaccaagagaccccaatactcattgatattctagatgtttagaagcttcattaattacaaagtagatggctctagattgagaaaatcctaagctttgcttcctagcattccaaaccttgcctcataaaataacaattgtgttgaaaattaacaggtagaccttttcctttctcccctacaatctgagttagactcaggactcatatcaactagaaaattggatagctattgcctctacctaacagttgctgatctctgagacaaccaaattgcttttttctctttattctcatctctctttcactaaactcagacagagctatacattcctagggggaaaaaaaacctggatgagaagaggaggggagcacactagatgtgaattgcattctgggaagcagagacttcccacatgaaattttttaggcaggaaagaaaaaccctagcagcagtgcaggaagggaatttaatgtactgtgttgatctagagtattagaaaattgggcactgagggtaaaagatgatgtcacttatttaatgtagaccagcctaaggtgaaagcctactagacaccaaaaactgtgcttaaatacttattctccggccttctgagaagtatatgcaattaaaacgtaaatagaaaacagggccaagtgccgtccacatgtgtctcttgataagcccagcctgaaaacacttgctttgcttttgaggattaataaatttaaaacacctttgaaaaagtacttcaaaaataatgaaaaaaagcagagtactcagaagaagtggaggaagagtccatctctgaaaatgatctattgtaggataaagaagaaaactttagaaagatgtgtagcctccccaatcatatgcagcaaagcaggctccatgaaatagcctgcaattggaggatggggcgaaaagggagatgatcatgaaaaattcataggaaactaaaaatgtcaataacacaatacaaatatgttaaagtcaataaggcttaaaactgaggctgttgaaaagcaagtcaggcaactcacagaacaaagaacccgaatagctaacatgtctatgtatcaccactcagccacattccaggcaaagcactgcaaaatcaaacaataatgaagtaccactttatctctgaaagactaacaaaaattaggaagtcagataatatcaaatactggccaggatgtgaagaaatgagaatacttatgtcctacagctagggctgtgggtacagccattttaccagaaaatagtgaaagctaatatgcacataccttgtaataaaatacagtaaaataagatgctcttctagattgaggaggacaaggactaagagatgcaattatgaaaagaaaataggacagatatggatttagagaatgaggagacaacatacagataatcctgtggcccagaggagagacaagaatatataggaatataatataaatatatatatgataaacatactacatatgctatatttattatgtataayatatacaatattataaatgtatatgtaataaatatgttaaatatattataaaaatataaatataaaacaatatacacaatataaatatagcatagtcattttatatatatatattaggtttttttttactgagttggaaatacttgagtgtatggattgtatacaggtcgtgtatagggctctctttatcccaaataaaatcaagagtgcgatttttttgaattccaggaataaggggaaaaaaaatctttcaggcttccaggtagaggaaactgggtacctacaaatgaacgacaatcagtgacaatcaagccagccccaaatttctcctctgcatcactttgtagtttcaaaggggagaaatggtagcccaagaatttcatgcccagccaaattctgccgtgtgtcagtgcaacacagggccatcctcagtaagttgtcaaccctttatccttctcaaggtacctattaaaaagtactccagcgggctgagacctgaggcaagattaattcacatagccagaatagagaagaatagatacaaagttgaaaaccagcgggaacaaaaggaaacaaaaaaagggaagcattaaaaaagaagagatggccaatgagatgataaatgcaaggccaaatatttactacagcaataaacatacatattttaaaatctgtccatatgctcttttcaagatgtgtatttaaaaacaatcttaatagaatatgaataaaaggaggataaaaaagtgacaggcaaatgcaagcaaaaatacagtaagggttgcagtattaataacaagcgtgatacagtatcaaacaaaaagcaataaaatgacaaacaggtttattttatcttgataaatatttcaatcttcactcgctcaatgaatatctattaagtgcctgttatttgcactaggcaaaagtatatattgctgaaaaatgaagacataattgtgatgaacatttatgctcaaaacaagataaaatgaacacataaaaagcaaaaacagttgaaatacatgaagaaatggtcagagacaatagaaaaaagtttaacaaacttctcagcctttgatagatcaagtaaacaaaaatacaaagcgtatgataatataattagtttggttatatctattatgcataagtagtctaataaagaattctatagcttatgactatagatttcatcttttttccagccaccatggaacttgtacagaagttgattgtataataggccacaaagaaaatctcaataaattccaaaagcagacactgcacttgccaaattctcaaaataatgcaataaaactagaaattataagaaaactagaaattaaattttaaaatactctccgaaataaatccttggctaggaattaactcaaagcctcaatcacaatctgttcagaaacaaacttggttatgcgaaacaaggcaggagagctcagaaagcttggtctccaagttagggccctaatgctaacagccctggtgatgccagatgctgggtgactgtgctaggggaagaaggcctggggagcaygtaggaggcaggtagatagtcatccatgggagaaagcgcactagtgttagggtcctatagacccgggttcaagtcctgcttctacctcttattagctgtagtggaattttgatatcttatttcggggctgcagtctacttattccaaaccaggggtgtggagctgtatctgtggtcctcaaccctcactgagcatcataatcacctggaaaatttttaaataatactgatgcttgggctagatgcccagagattctgattcagttcgtttggagtgggaccaagtcatcagtattctttaaaatctcccccaaataactccagtgtgccaagaaccccagagctagatgatttctcagatgtctgttagttttgaagtccagcagtgctactgggcacctgcagtttttgcccatggaagaaagtttcaggaggctaaagccagagtaaagccagagaaacagtgacgcaaagcaatctaatcaaagcgtgcattatctcaaatggtgcagaaaatgtcagtgccagttaatattttgcacccaacatgatttagacccggggcacatattgtactccaagcctattgtaaacccaatgggccatttattcactgaacagtaaccacggtaattacccacagggaaaacatgaggttgttcaagcaacaattaattgtggacctggaactaatgggacaataatggtaaagtagcaaccagagtgtgattaagaaatcacatcagaaagccaatattttccaaattgtattagatamggatttttggggatgtgatggtatatataatgtccctgtcctgaaatagttcctcccaggtttttctaatagctccttctcccactggtgagcataggaggcttgcagtgtttttaatcttgtgagaagaatcacagacagtaggtttgaggggactatagagagctttatttcccgcactcactacgggacctaaatgtcaactgaaggcaggtgtgcagaccttgatttggttggaatgatcctctttgtgaatatgatggaagccactgattctttttttcagaaaaatgtgcatgtctgtctgcacatacatggccatgcaaatcctttcctacagttttcagggggttcacagacactttgaagcccttctgttctcactaggttgtggtccagtctttgcttgcacacctccagacacagggatctcactacttctgatggcaggttttccaaggccagacaactctgatgtgaatgttcctcaatgtgtccagttgaaatttccctctcattagtcctcgtctaccaagaatctttgaacactgacaaaagtcattctacctttgacctttaccggtcttggggtgtctctctgttggatcttagaagatggtttctacgggggctctgtagcttcaggtaatggctgaattactgttgtgtggtcagctccaatagataggagatccagcaattctagagagtgrctgtctaccctctgaaacagacatggaaagggacaaatctctactgccccccacaaacttttgtaaggggaacgtggttctagggtgacagaagaagcggtaaagcaactttagctggaggctgagggtaccaggatgttatttccctggatgcttaaattggaacctaggatgkatcaaatccagagctgctgctgggacaagcaagggtttggggagatggctggtggcagcaaagattgagcttgcttcatccatgccctctctggatcaaagatttgaatgaaacaaaagaagagaaggagggagggagggagggaaggagggaggacagacagactagaagaaaccatggagaaattattttataatctcagagtaagagaggcctttcttaaatatgacataaaacctgaagtcataaaggaaaaaaactgataaattcatcctcattaaaaaaaaccgtgattacctggaaacggcactataaacaacatcaagaaacaaagtacaaactgggagaaaaattagcaacttatatcataaagggctaattttcttaatataaaagatcatttctataaactgataaggaagactactagtcaaattagaaaacaagcaaaaaatgtgaacagtttccagaaaggaactaccaattacttttacacataggaagaagctgggtgcgatagcacacctgtagtcacagtgactcaggaggctgaggccagaggcttgagcccaggggttcaaaaccagactaggcaacatagtgaggccccttctctgacagatttttaaattagctaggcatagaggcatacacctatagtcccagctaccccggagactaaggcaggtggggatcgctggaacccaggagttccaggctgcagtgagctatgatagcagcattgtactccagtctgggcaacagaatggaccctgtctctaaataataaataaatatatatataaataaaattaatataacaaaatagaaatattcaacttcactcactctaagaaaaatgcaaattagaactataaccagataacatcttttcaccatcatactgcaaagatcaaaaactttgataactaccttctgtggctgaggctgagggaaggaacagagatcagaggaagtgttatggaaggggtggcatttaggttgggccttcaggaacagacaattaaaatccaacttaacaacttaactggcacttaaaagaaaaagaagaaataataaagagaacgatggacagctttgactatcgagtgtaaattaaaatacacacacataaaatgtaaaggcaaactgagatatttgcagcaactataatagcctgagtttgaacgctatatatawaaaatatcttcattaaattcaatctgaaaagcattagaataccactcaaaaaataaacaaaggacatgaaaaagtaactcctaaaataggatatgctactagttaataaccatagggaaaagttcagcattatctataaccatgaatgcgatatgattcagggttttatttggtgataaatcattataaaattagacagaataacattttttactccctgtgttggcaaagatgtggtgagactggccctctaatcattcctggctactaaatttgcaaaccgataaaatgttttttggaaataagtataaatctttaaagactcatattctttatctggaaaattttacatcacagactctatcttatggaaacatcccaaaatataaaacaaaaatgctatgtacaaagatgcctgtagaataatatgatgataatgacaaattagaaataatcgaaataaccccaaattagaaacgattcagtaaatttatggtatattcatatgctggaatattgtgcagctattataargtttacgaagagtttttaaggataccgttaaatggggaaaaacagttcaattgtgcatgtagaatgatttcaggatcttttttaaaaaattcaatcactgcatagaaaaaggactgggaaggaatagacgataacatgaatgatggttctttagggaggggtagatcattggctattttttcccttcttcctccttattttgcatttttaaaccttcccttccattatgatatgttactcttacaataaaaaagttttaaaaatatctgtccctgtgtgtttatgctctaagttgaagctaacagtctctattccagtaggaaagatgctgggtcacagctgtgaggctcatcagtaaaaagcrttgtctcttttgtgtttttcagctttcttttgctgcaaccacgccygttctagccgataagaaaaaatacccttatttctttcggaccgtcccatcagacaatgcggtgaatccagccattctgaagttgctcaagcactaccagtggaagcgcgtgggcacgctgacgcaagacgttcagaggttctctgaggtacgctcggcttgtgtggacacggcctgccttactgcttgctgctgtcatctagcaaaaggcaatgtggtttagtcagggatgggtactgtcacagggcttttaagcatgtgttggttagtgcgatcaaagctgtttcaccgttgacaaaatagagctggtagctgaggaatttcactgtgcataggactggtggaaaccatcatcaggagtgaaccttccctttcattctttttattggctacctcgtgtggcttattccctcagtggccctgtgggcttgtctttgttactgatgctgtcgtgaccatctaagatcacaaagttctaccagggggtgtgttcatctgtgaggagagttttggggaagggctggcttggaccraagatgccaatgtcaccttggatggggtacagagttttgtttgttctaagtgacttacaaacacaccttaatatatggtaggcaatttttttgttttgtgtatgtgttttgttgtggggraaaaaaaagccaaaatatgggtagtaaaaaatgtaaaagtgttgctttgtcctaagccacctgaatcatgctttctctctgaaagttaactcctgctttcacttaggggttcatctgcctagaactttttcaatgtatttgttttaaagccaaatgacttcatatcatgtatgtttcttttttcactttacaacagatcttagaggtcttgattaacctcatggtttaaagggacctggtgttctgtcagatgggtatatcgtaacttaccgagccagcccctctgaacgttgaccacttttcaatgggacaaccatactctcatggctaggtgtgcgtcttggcagtagacttctagaagtggatttgctgggccatttaaaaatttgagaaggactgacttccaaaaaggcagttctaatttctagtcccaccaacagcatttgaaaattcccattttcacatatccttactaacagtggatattaacaaatatttgaaacattagcctcactcagatgagtacaaaatggcctcctgtcttttttcccatttgctttgtgcctcctcctytcctttctattcccatgtgtgcttttgatacttggagcctccaaaaacacaagacaaaccaagtgttcttagcagcccaagagaaacaaactttagccgtgtggaggatttccatgtgtgagtcaggggtctagacagacctcagccggagcggtgggggcagacacacagcctcttgccagcctgggaatggggaaaggccgggcagggtggcaagaaagttgggagtagaacagggctggtaatcagcagacctggtttccactgcagctctgcacttaccttctgaggttcttgccccctgtctcttccatgggaaggagagaccacttcatacattggctgtgtgaccttggagacgttaccttgcttctctgagcttcgattcctcccctgtaaaatggggacaataacttcttgcatgcctccctgcagggcttctgccaaaatccaatgagtaatggatctgaaagagcttcgtaaactgtaaagttcatacacagagagggttgtttttggaggtgcgtgaaaagtggaagtgtttggccccactgtctgtgggtatccaaacaaggcaagcttttcccaggcaagactgctcgtcatcttcccacctctctgtttctcagcccctaggaggaggcacaaagggaacttgacctccagcgggagtgactcattgccaaacgctgaagaggcttttgctgaaaggccgccttcatagagaagcgagaaatgttctaaaatgagagtgaaacaagtggatggtggaggataagaaggacccatcccatggccccattaacactggactctactaggatttagagagacttgctttttcctttttcttttctttttctttttttttttttttttttagacgaagtctcactctgtcaccaggctggagtgcactggcgcaatctcggctcattgcaacctctgcctcctgggttcaagcaattctcctgcctcagcctcccgagtagctgggactacaggcacgtgccaccacacccagctaatttatgtatttttagtagagacggggtttcaccatattggctaggatggtctcgatctcttgacctcttgatctgctcacctcagcttcccaaagtgctcccaaagtggcatgagccaccgggcccggccagacctgcttttttctaatagcatctttggctgtcagagcctgaaggacccttagagacatatctcctaccctcctcattttgtagaaggggaaactaaggcccagagagggaaggggacaaagttcaaggtttcaaggcacctctgaagtcatgaaagattgttcacagaaaagtcaggactaaattttggggtcctgaacccctcagttcagacttcccatttctccttcttttcttctctagcttcctggaattgcatagsaactacctgcatatagcctaagaggtttgaaattcccaccagactggttctaaagggggtaaattgtgagccctgacattggttgtgtgccttatagattcccaaaaactctcacagacagccaccctgtaaggaggagtgatggttcccattttacagatggggaaactgaggtttgcagagggtgggaggtctcttgccccagggcgcatgctggtaaagagcccaggcagggctggaagctgtaccctcaggctgttgctgtgtgtcctcgctacatggtcctcactgggtaatctcaggtcttgactgttgggtagcacatctttccccttgcacagccgtgtcggggccctcagccagggtttcagggcatctcagtgggaaaccttttttcccgaggacaggatgctgcttgctggtattgctggcaaggacctctcttgatttaaatctctcagcccagctgactcctctctgtgcccaagggctttggcatccctctctcaatgtctgggctgcatcgctggagtgcaggccctggaaactcgccaggggctaacagcttttcatgagtgcaaaggaaactggattccttttatgaaactggtcgatcagcaacgtcaagcacttctgttccggactggtgcactggaaggaatgtcaagtgaaagaaatcctgaagtcrgagggggtggtggaggggctttactcccacggagcttattactgtggcattaggactatggaagcgggtagaaggctgagggccatcccacctggggaccagctgctcctgtgagcacctccaacctctgagtttcaaggtaagcccatggtaacccagaggctgctcaggacttgggtcygaggtactgatctctaggcccactttggccaagcatggctgcgtgaccccaggcaattcactttcccatgctgaccctaggatgtatcagatctagagctgctgctgggaccagggttccatggagagaattggctactggaaagtttcagcttgctctgccatgccccctctggatgaaagatgtaaatgagacaaaagaaggaaggatttggtaccaggtgggctgatctctgagcccatccttgctaagtgatggctgtgagatcctaggcctcatagagatccacttttcccttgtgtaaaatggggctatttatcctaccttgcaggtactgaagatgagatggttaagtgagaaaacagaaatgaaagatctctgtgtagtaggtgctcactaaatagccatttgcttctccagtgattcatggggcaaactgaaaatgcaggcccattcactcaaaaaatcagtgtggcctcctatgtgccatggtctgtgatgggccctgtgctgtggaggaccagagatcaatgacacagcctgggggtgagtggtgaggcttcctgcattgtgttctcaactctggctgctcgctagaatcaccagggaaattttgattttaatacaaaataaaatgtacatttttggattttcttccatttccttttcttcacttttaatagccttattgagatataatttacataccatacagttcatccgttgttaatgtacagttcaattattttttataaattttttatgttggccaggtgtggtggctcacacctgtaattccatcactttgggaagccaaagtggaaggattgcttgagcccagaagtttgagaccagcctggagaacatgacaaagccctgtctctacaaaaaaaaatacaaaaattaactgggcatgatggtgcacacctatagtcccagctacctgagaggcttgagcccaggagttcaaggctgcagtgagctatgattgccctactgcacattttaacttgggagacagtgagaccctgtctcaaaaaaaaaaaagtatgtgtttgtgcaaccatcgccacaatccagttttagaacactcttcatcactctaaaaattcccatgtgcccatttgtagtcagttccaccccccagccccaggaatagttttaccttttctggaaatttcatataaatggaattaaagaacacgcagtcttttgcgtctggcttckttcacttagcgcagtgtttgaggcacatcatgctgtggcatgtggcggtggtttgtttctttctactgctgagtggtaatcccttgtatggatggagcatctggggagctttgaaaatcctgatgcccaggccatccccagagcaaccacactggacgaccctggtgttggagcctgtccaagctctccaggtggcttcagtgtgtcgccagcgttgagaactcacgtcctgcgtaattggctcagagtcaggagctcagggtggaagtgacgccctctggtggtgggagaccttgagctcaaagtagccccattctacctggtggcctcggtctacttktggccctcagcaggcctggggactgaggagcaggatggagaaggtggagggaggccttggtccagtgctgggggccctgccagatggaagacaacagtaggggtgtgaagagttgggtggtccacgaagtctgtgttggagagggataggcaggcaggtaacccgtgtgcacattgaggggctgcggtaaggaactggagggttgttgggaggctgtggacagagccagaagaggggcataagtaccgagagtccagaccctggtgatgtgtgaagacccattgtggcatggaggtgcaggtcactggaatttagggcaaggagctgagaggccagagtgctgagtgatgtcacatgggcactgcgggcccaggagggagatagggcttggggtggagatgaaggcagtgggcaggggrtgcctagaaagacagcagagggaggcagagacatttgggtctctcccccttttcaagtcttatggtctacccaaccatcctcaccaagttatyctttgggctctcaattctatgttgcagctaaccaactaagtgcttaagtacccgtaagccaatcacttgctgtctctgggtctcagtttccctttctgtaagctaagagaattgggccagttgacctctaagatccctcctagctcaaagaattttggattctaggatgtgagcttatggagacctggcctttgaccctgatcctgccactcccagggacatggtcatgagaattacttgcctctttgtgcctctgctttgtttgtttaagagactaattttagaggattttaaattcatagcaaaattgagagtaaggtacagagatttcccataygctccctgcccccacacaggcacagcctcctcattctcaccatccctgtcagagtggcccatttgttacaactgatgaatctacattgacagggcatcatcacccagactccagagtttacattagggttcactcttggtggggtatattgaatggttttggacaaatgtgtaatgacatgtattcatcattatagtatcattagagtattttcaccaccctaaaagtcctctgtctttttactgatccccatagttttgccttttccataatgtcgtttagttggaatcatacggaatgtagccttttcagattggcttatttcccttctttaatacgcatttaactttccgccatgtcttttcrttgcttgatagcttgtttagttttagtgctgaattaacacagctgtcccttagtaaccatgggggattggttcccagacccccatgggtaccaaaatctgagaatcctcaagtcactgatataaaatggtgtagtgtttgcatatagcctatgcacatcctcccatattctttaaattatctctagattacctttaatacctaatacagtgtaaatgctaggtaaatagttgttatactgcattgggtttttttttgtgttattttttgttgctctgttgttatttatttatttatttatttttaaaatatcctccatccgggctgagtgtggtggctcatgcctgtaatcccagcackctgggagactgaggtgggcagatcacctgaggtcaggagttcgagaccagcctggccaacatggtgaaaccctgtctctactaaaaatacaaaaaaaattaactgggcatggtagcgggcgcctgtaatyccagctacttgggaggctgaggcaggagaatcacttgaacctgagaggtggaggttgcagtgagctgagatggcactactgtccttcagcctggcaacagagtgagactctgttcccccggtgcccccctgaaaaaaaatatcctcaattcatggttggttgaatccatggatgaggagcctgtggttaccaagggtcaactgtatccattgtcaggatgtaccacagtttatccattcatctgctgaaggatatcttggtggcttctcatttttttgcaattattaataaagctgctctaaacatccatgcgcaggattttttgtggacatcagatttcagctctttgggtaaataccaagaagctccaytgctggatcatatggtaagggtatgtttcatgttgtaagaaaacgccaaactgtcttccaaagtggctgtaccattttgcattcccaccagcaatgaatgagagtttctgtgactccccatcctctccagtatttggtattgtcagcgttctggagtttggccattctaatagatgtgcagtggtatcttgttgttttaatttgcattaccctcatgtcatatgatgtggagcatcttttcgtaggcttctttgccatctttttttcatcttgagcatgaggataataatagcacctacctcttagggttgttgggaggattcaatgtgttaggatacttaaastactaagaaaagtgcctggcttatcctcagcaccatgcaaggggcagctgttatttttattaacatccagaatcaggttccttagcccgtggctggcccctattcaggagccccactgcatggctgagtttctgtgcctgccatgagcatggctgcctttcccttttctccctccaagctccaagactccccacctagtcactggtcctcagtgatcttgaggcttctgaagctgacctttctgtactggcgacctctctcaagtggcaggccccactgaggtgaggcccttaatctgcccgagaccaaaaggtcagcatctgcagagcttcctcttcaaagcacctgccctttcaggccctccagggccctgcctggccctttgaaacctttaccccttgctaagttgccatctgccccaccaaaagggccttgggtcaactcctctaaagttgctgcttactcttccagagtagtagcctgggagacactcctgcaggggaggacggggagaccctgggcttgcatctaatctagaagccacccttgttagaatcatcatcctctcctgctgctctgagcaggaacaagctccttagcatggctcgagaccctttatggtctctctgaggcctcctcctctgtctcacctgcagtcacttcttcctttgcccctttggtccagccacacctccatgctggcttctctcttggcaggaacatcctgccctccatctggctcaacctccccagctggctccaggtgtgccgtctctgtgttcttcctcctcatttttctccccataccagttctttgcatgatgcagcacaagacaccatttgcttcctcatctctcacccactgtcactggatgggggatgagatgagatgatgaatgagagccacagcagatccctgtgtcccctcaccctgcatgctccctggtgcaggtatgttcagtgaggatttcagtacatgattcttgatccattaggccagattcttagggacaaatgcagttctttccctcctgttttcctgagtccacctgttcctgggatggtgagatgaaggtgtaaggggtgcagagaaaccccagccccagcatccaggcttgtgaagagtccattccctctcttgactgcctcctgcctgagtcacccgggccatctggaagagcagcagggaatgacggatgattctaacaagggtgactcctaggttagatgcaagcccagggtctccctgtcctcccctgcaggagtgtctcccaggatactgctctggaaragtaagcagtaactttaaaggagttgacccgaggcccctttggtgggacagatggcaacttggcaaggggggatcgttgcaaagggccaggcagttctggcagagtcagcaagtctgactcctgcagaattccactcaggtcatgccatcatttcttaacttgaagtcttttttggatgtgacattgtttgttggtggaaattcttctagagatctcagtggaaagttctggaccagccattggcatcaacaatccccaggaacctgccacgtgcttgcttatagatgatgtaggtgttgggctttgggaatgcacacacggtagtttgtgtccaagttaattttcctgaatttgtcatcctgggagaattttttcctgagttgttaatgcttcagaatcctctctcttcaggattgggcaatactgacttctacaccagtcgttctcaaagtgtggtccctggaccagcatcatcagcaggaccacttgggctctgtccyagccccagtgaatcagacactgtgggatgggctcagctttatgattttgatgcagctagagtgtgagaaccactgcactgaaggaatgggcagccttcaggtgggaccactgtgctcccaagctcactttaactaagaacaaggccaagcacacttggagggctgagccacctctgagctctgcccttggcatccctcctggctgcaggatcacctgggctgccagcgtatctgcagatcttttatcattaggagacagaggggactccgacggatcagattctaatcctaatggtactagtgccccacctcgggccccaacttttatctgaagaacttgccaatgcttttaggtgacttggctgcctgcccaagcaagcatcctctccttctctgtgctcttcccttgagctctgcaaggggccaggcctgtgggtcagccagcaggaaaagattcttatctgtcctgtccagaccttggtggttgtttgtggcagcctctttggcatttgaagggttagggtaggtccattatttcccagagaatggtttaaatatgtgatatgatttttgtacaatcttaatatctctgtatttgtgttattatacactaggaaaaagtaaaatgatgactagcacatcaaaactgtacttcatggatgttwttgcttaagatggaatccctgtttaaaaagtgacaccattcaattgaaaatactaattaatgcttacacgggtggtgcacagacatggtgaaatggcctctaagaggtgcaggagtgactgaagtttggggaccactgggatgaataaaaagcacttagccgcctgtttatttaactcatgaggatagatgggtgaagggtggggagtgggactggcaatagacttctccttgaaactctgatctaaagcagataatcaatgggaaaggcatttgatcaatgtcaagaatcagccccacaggccttcagtcttctgctgaggctccatagggacagatcctggggttcaagcaacacttgttctttcatgtgaatgttccctgtgggaagtgcagcccactagcagtgctctgtcctacccacccctgcagagtgggaagaccccacctaggtgagagccaccgcctgtcaggggctccagtttctagtgcttctgccatcttggagcagtgtgtgcacatctggagcatttccaggatgttttgctcagtggtggctgccatggctaagcctgctgaagacagatgtccgagcttggatgcctttatctggctcagagctcctgccctcgggacagatggcccactagtctcctcctccctctactccagagcagagagaagatggctgtcccatttttggttcaaaaggaagacctcaggacctagtggatggtcccccataacactccacaccaggtcctcagagtggagtccttctccccactccacatggaccccgctcagagaggctagggtgactggccgtgggtctgtggtgccaacgccaggctcctgaagggctgggtgagtgttgtactctttgctcaagagggcatgtgatattagataaatatatcctccactcaagctgtgaggatcctggaacatagcrttgactgagtgtgccttcttcaaaacagtccacaggagatccttcaggtctctgggggaaaaggaccatccacagtgacytcagcaccctcaccagggacacttcctggtgccacctgcccagccccgggccaggctcccagggcaggactcaagccttgcgaagcaacccttccccctctatacacacacacatcaggaccttgggagtaggaaaatgtgattaaaatctcatctgccagttattgagaacctactgtgtgccaggtagttatgttcaattattcagcatggtgtggtctccctattttttttttgagatggggttaccctccatcatccagrttggagtacagtggtgcagtcgtagctcactgcagcctcaaactcctgggctcaagcgatcttctggctcaggttcccaaatagctgagactacagrcacacgccaccgcgcctggttatttttattttattttattttttgtygagacagagtctcattttgttgcccaggctggtctcgaacttctgggctccaatgaccctcccaccttggcctcccaaagtgctggtattacaggtgtgagccacagcacctggygctgtctcccttttagagagcggactcactcagggagaattaagtaatgccagggtctcatagccacgaagtggcaggtatagacrtgaaccccggtttgtgcctgcccttgtgaagaagaggaagccaggagtctggggccaatatccccccaagtccctgtaccccacctaccacagaagcagggaggtgaatatacaggccaatcaaccatgtctcaaggggacctcttcacagtcctttggaatttttgccatgggatcctgcatttaatttttattattttctcaagttgggaatctcagaacagagcactgtcccttcacgctgctcctaccacccttcccgggacacgttgtttctgccggtcctcttggctgacagggcagtgcatcttgtagtgtgtaggttccctagagctattctggtacattctggctgtggtttctcccccaaggcccatctgccaggcttgggtagtgccagagccgcatgagcaaaggagtggagttgggaaggtgtgtggaaccttcaggaaacagcaaagagtctgttggggctcgatagctccatgaacagaatgagaagtggaaggatgagctaggaggcaagmaggatggcgaagatccctgcatgcctctaagttgagactttacctgtcagcagttgggagccatggatggtttttaaatgagaagtgagatagtagcagtcctgagggccaattgggaggagcagaccagaggctgtgaaagcagccaggaggttactacagtaattcaaaggaaaaataataagattacagttactttcttaccataaaaatgtcaagttcttttttgtggttatttttattttaaagtactaattattgttttttaattgtaatatggatatgaactcaatgcagaaaacttggaaaacacaaaagagcacaaaggaaaatttaaaattggccataacctacccactgaaaggtcatcattaacatctaggctgatgtctttaccattttttcaatgcacataaatgaatgtgtgtaaataaatacatgctcttgctatcgaaatggcttcttagcaatgcagggrgaatgttttcccaggtcagcaaatgttctccgtgactccgtcacygtgactcctaatggctacagtgcttcttgacttgaccccaatctgtgccatagccctgatgtgttttgaattgtatttgcctccagtcatatttatcctacagtctgttccctttcttcctatattccaacaattctgcaaataccctgtccatgaacggtcttcttcttttttccaaaactgttgggatttttttttttcttaacatttttttggccggccatttcaaggattcggrgatgggacaggaggtagatgtgtgtttgctctcaccatctttatccaattcctgtttaaactattctaccctgtgcgtatgccatcagttactcaagaaggctgccgttattgaacatggaggtagttgccaatttttactgattataaataatgcagtaaactcatacttgtacttttgtgggaacatctctgattattttctgaagttaattcctagaaatagcatatgcacatttttgaaccttttgtacrtattgccaaattgtcctccagaaagatcatgccaatttagagtttcatagcagtatacgggagcattccctgccagtattgtgtattmttcttttctgatttttggcgattgctattttaatttgcatttttttcattactattgagattgaatttcttttttactaagaatatttctcatttctgtttctccttttgtaaattggctgttcatgttgttggcactttttcccattagactgttcttttttttactgatttataagagctctttataaagtaagggtatcagatcagccttttgtcatatttgttaagatatttctccatgtttcatgtgacatttaattttgtttttgatattagttgatctattgaaaaatttagtgtgttatacagttaaatttatcaagaccatttttttcacctttccattatgcttgacaagctcttcccatctccaaaatttttgtaaatacatacctatgttttcttctagtatattttttacttcattcttcactttatctggaatttcagtatatggtctgaaatatcagcctttcctctcctgccattatagtcactcaatttttctttcagcacttaatatatctttttctgatttacttaaaatgcctatgctaaattttatctttagaaaataatatattacacttttgcttatgctttaggccagttctgtatgatcgaaatataatgcaaaccaacatatataattttaaattttctagtagccacattttataaagtaaaaagaaacaggtaacattaattttaataatatattttatttaatacaacatatccaaaatgctatcatttcaacatgtgtcattaggatttcaagcgcttgataatcacatgtggctgatggctactgtcttggacggtgcagcttttgactgttgctgagtttttacattttgttccattaatctgtctatgctggaatgggtacctcagggctcctttataatatagtttaatgtgcagctctcctttctttcttaacagttgccttcattttcaccagtttaattcttggcatttttgtttgaattttagttactttaattaatttgtagaagagttgacatctttataataccatgtcttcccactcatgcatatggaacrtttcttgttggatcctcagcaaagttttgtcattttcttcatacaggtcctttccatgaacggttaggtttattatcaggtattttacatttattattgctttggggaatgggatctagtttgcttgatgtttttaagtggttattggtgggatatgagaaaactattgatgtatatatccacatcttatgactggctacattgaactcctattatttctgctagtttttcctctcttaattctcttggattttctaggtagatataataacatctggagcaagaataaacttgctttctattttccagcattatggcatctttattttcatcatttttcattgaggcggtactgcatagtggtaaatgacagtcatagcagaatgaccgtctgagttctaattccaactcagctacttgccagctgggtgactttgggcaagttgtttaatttttctgtgtccctgataatggggaaatgctaatataaccttaggtgtcatgagtattaaaacagctaacacatgtaaagcatttagggcttagaacagtgtccaaaggagtgaatacccactattttatatatacatatatatataatatatatatattattattatatattattaacatatgaataatatatgttattgtcgttaatattgcttcattcactggatgttctagagttatattttaaaatagtgataacagtgggtattcttgtcttgtccttgactttaatgagaatgctcttagtaaggtttgatgtctgttagaagagcagatattcctcctcatctcaagggatgttctatttttatttactcagtgtttgtacctatttagctatgcatgctaaaatgtcagatgcctttttagaatttgtattgatagctatggatttttactttgatctattagtgtgacaaattatagtcatcagtttccttgtacccatttggtaatacattcattcatttaagacatatgtattgagtgcctagcttgtgttggtcaccattctaggtgctgtagacacatcagtgagtgaaacaaagtccctgccctcaaggagcttacattctagtgggggaaacaaatgatttaaaaaaataatgagcaaataaatttaaaatatgtcagatgataacaagtgctagggagacaaagtagagttaagggagtaggaaatcccatgcagagagtggtgaagtcaagcagagcctcaaagaggtgatgtttgggcagccacctgaaagcagtgaggggcaggttataaggagacctgagagaagagggttccaggcagagagaacagatgcacaaaggtcctgaggtgggagggactctggaagtgctggagcaatgtcaggaaggctatgatgactggaacagggtgggtgtgggagaagtagagtggttggtgtggagtggaggtggggcaagagatctgtggttcttttaggatatttgtgaagactttggcttatactttgagtcagttgggaaactattggagaatgttttgggttttgtttttattgggaaaaaattcacataccataaagtccaccattttaaagcatacaattaaatggttttcagtatatacacaataatgtgcaacaattaccactatgtaatttgagaatatttcatcactccaaaaagaaattccacatccattagcagccactcattttctccggcccccagctgttaatctactttctgtctctatagatttgcctataatgacatttcatataaatggaattacaaaatatgtggcatttgtgttaacttatttcacttagcataatgttttcaaggttcatccacgttgtagcatatatcagtacttcctttcttttttatggacaaataatattccaatttgtggatgtaacacattttatcattcatcagttgatggacatttcagttgtttctacttttgactattatgaataatggtgccatgaacattgtgtacaagtttttgtggggatgtatgttttcatttctcttggatytacacctagaagtkgaattgctgggtcatttggtaactctacgtttaacattttgagaaactgccaagccattttctggtttgcatcaatggatataccatttacattcccaccagcaaggtatgagggttccagtttctccacatccttgcaaacacttgttattttccattttagaagagattataaccatcttagtgggtgtgacatggtgtctcattgtggttttgatgtgcatttctctaatgaataatgatgttgaacatgtgttcatgtgcttattagctatttgtatatcctctttggagatatgcctattcaaatcctttgtccaatttttaattgggttgtttgtctttttgttattgagttgtaagcattctttatatattctggattagatcatatcagataggtgacttgcaaatattttctcccattctaagggttctttttactttcttaatggtgtttttttgcacaaaagtttttaattttagtraggtcaaatctatctttttttcttttgctgcttttacttttgatgtcatatttaagagaccattgtctaattcaaggtcatgaacacttcagcccatgcttccttctaagaattttatagtcagatacaatccctgatctttgatctcttttgagttaacttttatatttggtgtgaggtaaggttccaacttcattctttcatatgaagctattcaattgttccaggaccatttgttgaaaagattattatttcttcattaaatggtcttggcacccttgttgaaatcgactgaccattgtagtatggatttctttctggactactggagarttttttttttaataagagggattttatctgacttaggtttttaaaagtggtgcttttggcaccaccgagtagagggtggtggtgacttgaactagatagtgaaaatcaaccagattctagatatttttgacrgtagagctgacaagatttcctgatggaatgaatgagtgtgtgagcgataaacagtgaggcatcaaagatggcgccaaagtttttgatctgagcaactggacagaatgagttatcacttctcaacttgagggagagtgcagaggagcaagtttccatgaagggggtcaacagtttagatacgcctgttgaatatccagatggagaggttgaataggctattggataaatgggtctggcattcatatttacattaaaccatattggcattccactgtttgttgtgctgtttgtttttcttttaaccaattcatctatttttttctgtaagtacgtatgataatttatattttgccgtgattgtgctgtctttgtcaggtttagttgtcaggaatattctagttttacgacaagagttggaaagctttccatgtttttaggtgccctatacagtttatagatacaaattaactgctctttgaaaataaaaaggtgtgtctatgaaaccatccaggattttacatttttcagtctgccctttttacaagttatctttgtagcttcttccatgcttattgattttggctttatactccttaaatggatttagtaacatattttctcraaaatagtccatttctttgggatcttcaaatttattagcatatatttcaggacaatttttaaagcctctgttttttttgttatagrccctttcttgtttttcccacttttccccttgattagatagtttgcttcttttattgatgtaattgttattaacatcttaaattctgtgggaaagaaatggttacattttttattattttttcaaatgaaattaaacctggatcaagcactccatctgccagatacactagggtcagtgtctctgtcttgaagtaccacccctctctaaaatgaccaacaactctggtgggttttctaatagaaagctgggagagccagcattctgcagcccttgcttcctgctgccacttgagtgtgctgtggacactggtccsactggttactgctgctaatctargttcccggttgcacttcctagcatcctcaagcccctcctgtagatctagaacttctgttggctttttcttttcrgatatccacatccccacaggtcagagagggttcctcttagagctctactcccaaatggtcctgttattccattttgctacgtaatagagctacacgtttatcctccttcttaaagcagctacttgattgcttgaggccgtgggggaggtctacttgcttctcctttaaagattactcatcttttcagacatttctcttgctaaagaagatagcagaaaaacacaagttaagtcttcagtagagcatcccattatcttgttttttaaccaaaggaccagctcttggattcttactggctgtgctttgatttatctgcttcttaatttattttcttctgcttttctcctgaataataccttccctttatatgtaggtttctttcaccattcttcttctaatttcttaatttgcatatttattttttactcttgttttggttgctattaagcgtakttaagcatataaatgtctttgattacagctttgatgaaatcctatagtttcagctaaataatatctcatcctcattataataaaactatgctacaattgtactttaagtttaaaatatcggtcttctacttccctaagtgccaacctagaaatgcaacaatatctattgtaagttacataaatcagtacacttgtttactctccatccctcactgcctctaattctgtattgttataatctgagttttaatttgattttactctttacattgtggatatgcttttttcagttgctatttgagatgttcactttattttgaaactatactacaataactatgattttaagattcaaatccatatttacatgactaatttcttctgacatgagtcagtttcatgagttatgtcttttgatttatctctctgtggcatgagtacatcttttgtttttcaggaaggtcatatgagttttatatctatgcccttgcataaatcacaatttctctctgtagctttgcctatgaatgacaagttatctaagtataaatttctatgatcataagctctctagacattacatcaatgttgtaataaagtctgatgcagtctgatttggttcctttggagataaagttttttagtcgcctgtaccagttgcttgtaggattctttctttatttttgatactcataaagaaaaaatggcacatagctgatttttgttttgtctaaaatatgattacatttttattcgaagaatctggtctttcttctgattgcattagttttcttttattatatctttaattattactcttttgttctgatatcttttttagaaatatcaataattcatgagwgagcctttgtagtttattctccatatttttgttttctctctggtcattttaatcttagtccttttccttcacattgtgagagaacatctcaagactgtcctccacaatattcatcagtttttttttacaattaaattctgctccttgttgcttctaatgcttcttaaaattctcataacattattcatttccagtcattattatattaactatgcctggtttcttttatctcagtttcttttctcatatattttattttttagatttagaatccagattttatttaacctccatgaaatacaaaatgggtattacaatttacctttatttcctacagcaattctttttagagatgatattctttctttgcttgmattccttgtttgtttcctttatgtttcagaaagttttcataggttccatatgcattttatgccttcyatgacctggtattcgcttacagcaygggtgagttcttcttgagtcccctcattgttttatctagatgctgttagattcttcaccttggatattcatctggaagactggatgataacattttatatgaccagcctagggacaagcagccaagggattaggaaaccatttggtggtgtgggcctttcttgtttaaatggtttcttcatgagtttgtcaaacagctgctccagatgtgcagagatccccctggcctctgactttgtttacttgcctgctgtgtctgsaaggtgcctaggcctgtcctggggaaactggacttcaataggctttgcttgttcgtagatctaatgacccagccactcctgaaggmtgttgggttgcagggtgataggtggactccttagtgagaggtaggccctgcacccttctgtggcccagcctcccctccagtacttactcacccatcagaggctgyraggtcagtctcgtcagcacatccaccctccctgcagcaccgcactactttctcaggaaggagagccatgagtcagtcttcaatctggttctgttggcactgtacctagcagaaattcctcaaagttggtggcatattgatggcactctttcctattttccaaggctgaagcagattcccccctatttttatattcccttggtcctttctgtcactttcagaaggaggtagcttaggtgggagttggacatctgtgcttagctttaccatctttctcaaaagtttcatagttaacattgtttcctatactttgtactttggtatatagacatatgagattccctgagcatttcctgttccatggccccccttttaaaattcctcatttatattggctttcttcatatctggttttatagtttttcctgggcacttttcctctccttctcaagttccagtttagcatcctctcgatcagatggagaattctcctgccaaacatggtgttgccagtcttggggcagtgagttctgtcccttgccagggactcatcatctggcgtcctgagccacatcctggccttcagcaatattgatggagtttccccacatcctcccttctctgccaaagttatgccctttaagtggaaacagaagaaaccattcccctgcctccaagtttccatcccctttgaaagccttgtgcttcactagagagccattttggatttcttctggcatacccagaccctcctgggtgagtcagcagacgtgggcagcaggcgttgtggggagggggttgcagaggctcctccatcactgcttggctgcctgccccaggaagacagcacatcacacaatttgccatatcaagtctgtgaacagctgcctccctaccctccgtggggagtcaccaagctccacacatctgctccttccgggggtggtgaaaagatttctcccatcacaggcacctatgaatcccccttggggtttcgtgaggtatagagtagcattctcctgcagaaagcccatagccagccttcatgagaagatatacctttcaggatttagtatcagtggcatcaccatcacttcctctccttcccccaatcccatggcatgttttccacacctccccttcttgactttgtcatttctgataatgaacactgccatttattgaaccttagccatggtagacacttagcgtatattagcttaccttttcaagaactcaaagacaagttgtggttatgcccttttaacagacaagaaaaaaagctcagagagtttccttactcacccaaggtagcccagcagtggggacatagctagcatgctagtctagagtcacctgactcgagttcatgcttttgcctctctcccacagccttcctagagggaaaaatagaaccataggctctttatcctgagtctagaacaggggtttgcaaactgtggcctatggaccaaatgcagccccttgttttcataaataaagttttattggaacatagccacacccattcatttgcacattgtgtatggctgcatttgcaacgttgttgggaaaaaacatgtaagtcctgcaaggcctaaagtatttactatctgaccctttaccaaaaaaaaaaaaaaaaagttgccggctcctagtttccagcataggctattgtagaaagagatagactttgaagttraatcccaggctccctacatcctagctgtgtgaccttgggcagttgactcaacagctctgaatctcattttatttacccataaactggtcataattgtaccttttgggtttacacccatgcccgcaaggagtgatatacgtttgagggctccacatatgacaggcactcagtaaatgagtccccactgttgctccggcctttcccgtctatcacggatgtgcagmcttctctaatttttctcttcccttctggagcattctggcagttctgcctaagaacccttgctcttctctgatcactggagcacagagaaagcacagatgctcctcaagcctcccccttgaaacgctgggcaccaggtgttaagtgacacccacctcaggcagatgcatagggtgtcctgtggtctcattcattccctcattcagccagtgctgactgagccaggccattatgccaaaatctgacaggggctcagacagagccttcaggcccttcagttgctcacagcccaggggcagatggacagattaacaagccgcagcaataacagtaatcttggtgcctctagattttggtcccctttggaaaattccattcagactctacagagtaaatacctgttccctggagtctctgagtactgctcgtaagaagatacattataaaatctgcttagtttagcacagtttcagaccctgctcccaggctggcagcctgctcagcactttggtgcagtgtccaccccaagacacagtcggctcacctagaccaccgctccctcccagggcacacactcagcacctctacaggatggggctggctccatgggcttcgtgggaggggaagcgcagactgtctttcctgaccttgagggagctgtccagagtttagatcctctccatacatgagcaacccagcatcctcccccagacacctgggctggctgtggggctgaggggacctcatgctctgtgctgctgtagtggattctctgggctgttgatcactgaagatcgtcccagttactccagagcagggccgagaaagcagggcctgggaggaagaagcaggggatgccagtgttsacaaggggtgagtgcatctcattggagaatccagaaggacttcatggaggaagggctatttaccatagggcttaaagggtaagcaggacttagacataggagggctgaagtccgraacttaaggggattcgcgcatgcatggtcagtggtgaaatgaattacaaagtgtatcttataatcttaggtgaaaacatatggatataaaaaattatactttgataatttctacctgaaaaacttatatctacagtattagcgtcctggcaagaaacagacggcatcttcagagctgaagtccgatttagatgaagtactttagscagaggcaatggaaccarccagggctactgcagctccaggggctagcaatggctggagtcacgagcatcaactgctctggaggacaaggggaggggcagagctactggaattgggaggagcagccgcttcacacgggctctraccaagccaggaagcagccaaggkaaaaaatacccggaactctttctcgccttctttctgactcctcctggggcctcccattggctctctttcactgagctcccataggctccctaactccyactgggctcccattggccctctgactcctgctaggctctcactggtcctctgactcctkctaggctctcactggtcctctgactccctctggactctcactggtcttctgactcccgctgggctcccattggccctctgactcccactgggttctcattggtcttctgactcctgccgggctcccattggccaagcccagctggaagttagaggaccaggccactcacgtgctgccctatctgaaagttctaattccatgaaaaaagcagggcagggcagggcaggctggcgcatgtggatgaaagcaaatgggaataaccaacatgatgagatattatactagttggattagtgtactgggcacagggatagttttatcactttactcctttcctcacttacaatgaagtttagacattattttgaaaagcttaaagtctttgagtcactatgagggttctacagcaagcagctgcgtttcgggctctcagcaggcaatattgtcatctgataacttggtggcaatgtagtggtttggtccaagctgacacatatgtgggtggagggcgagcctgttcaaggtcagtttcgccaggagagggactctcttggggctcagcatacaggagatttgttagccagtgcccacaggaagggrtgggaaaggtgggactgggtgaaggaagaagctgacacacaatgaggttgcaamaggaacctcagccaagcttgcccatggggagctatggagctaggatggcccttcagagaagtcccaaatagagaccagaaggctgggccagtcactgggtgcaggcggtcctggggaaggtgtgtgaccttgaatgaggctgcctcctttattcaagggcaaatccggaatgagtgcctctgttctggcagtgcaccrtagtatctccatcagagggcccttaggaacaaaggagtttaagctaaagggccactcagactggagcacactaaaagggtgtctctcaaatctggtcgtgcaaccaagatytcacagcattttgtgcaaacacagattgctggcctccctcctgtaccagtgtctgaatcgctctgttggggcccaggaatctgtatttctacaaagctcctgggaagaygcagatgcataagcatccttggaagctgctgccctaaactctgagcccaagggtggttgatatcggggagatttccaggtctgtttagcgctaccaggcaactgctctgtgccaagccttgtgctgggtcctggaacccaggagctaggagccaggatcaccaaagatggtgccaccctcggggtcaggaatggggctgggtactgcgtgggagcagcgcctgtcttggattttggaaagggtcctgaaaggtctgcaactggtggctctcttgggggcttastgttctgttgctgccgttaaataaatggctttgggcaatattggtctagaggcaagaaactgggtttgagtcccagctccgtgcctagaaagttgtgtgatttggggcaagtttctattcttcttgggacttcagtttccccagctgtccaatgagggctggtgagttggtgtgtggcagcctggttctgatggtctgagctcakcctctctcagacatgaggagtgggcctgagagtgtcagcactcactctgcctgctggacagagggctccctttgcagaccttggggccaggaggtgaaggtrgagtgcatcctcagtgttcttgtctccttcttttattaccattctctgattgtgatgcccttgcttcctggatatgtccagttctgccatgcttctctttcccgtgtgtcctaatcgcttgctttttgccaggctttatatccagcatggatacacagagaggccccaacacagtctcaactccccagggcctgccagtctagagagggatgctcaaggaggaaagccactcactgggtcctctccctgcaggaaccacctaggggccaggccagtgccaccacccaagctcttcctctcttcttcctctactctcccctcctggatgtttggaagtcagagagacatgagtatcagtcttgaccctctgacttactacttgtaaggctttgggcaagtgacttaatctttcaagtccctcatttgtgaaatggaaacaagaatgggatctgctttgtaagatkgttgaggatgaaattcactccagagtcaatcctggtgtgtcgcctgtggcccccttcctccctgagggcttggagtgagggatgggggtgggagagggggagtggagggaagggaaggaggagaggtgggctctgggagcagtttgcacctatgccttttgctgtctgtgccaaggcgagtccmagcccttcagttcctcacctcattccacaccccaaatctgaagccctagaagaagggagccagtggaagccaagaargggggtttgcaaatgctaggggcttaggatgttagagcagaacataagttgaggacaaatcacccactttggaatccagaactggaaagaaagctgctaataaaaagtgcagtgatttcccagggtctcagaaargagtcctttaaactccaccttgaagtgcaaaggtggacaatttgatcgcactgctcgtccagcttatggagcggcctgaagctgtcctatttctgcaggggtgagaacaggtaccacctaggcagctccccatgggcaagtttggctgaggcctctcttgcaacttctcaggtttgagaatttgagacgttccttggagatgcagcagtctcgtctgcccctccatctgatgcctgaatcccttctacagcctgtgcaacccacctctgcttgcacacctgtcatggcggggagctcagtcccacctggggaagggtccatccttccttggctcattctcttgttagaaagttctgtctctgagggagctgaaatctacttcctggtggcctcccccactggwactggccctttccctgaggcccaggtgccacgccagtcccctgggtttggtggcagttcttcagggatgcacgaagtgatatctcacaagcctagacttccccatgtggccgcctgccatcccctccaccattcttcaagagacaagagcagggatggggctcagacagccagggaatggttttttaattattattattatactttaagttttagggtacatgtgcacaacgtgcagatttgttacatatatatacatgtgccatgttggtgtgctgcacccattaactcgtcatttagcattaggtatatctcctaatgctatccctcccccctccccccaccctacaacagtccccggtgtgtgacgttccccttcctgtgtccatgtgttctcattgttcaattcccacctatgagtgagaacatgctgtgtttgtttttttgtccttgcgatagtttgctgagaatggtggtttccagattcatccatgtccctgcaaaggacatgaactcatcattttttatggctgcatagtattccatggtgtgtatgtgccacattttcttttttattattattattattattatatactttaagttttagggtacatgtgcacattgtgcaggttagttacatatgtatacatgtgccgtgctggtgtgctgcacccactaactcgtcatctagcattaggtatatctcccaatgctatccctctcccctccccctaccccacaacagtccccagagtgtgatattccccttcctgtgtccatgtgatctcattgttcaattcccacctatgagtgagaatatgcggtgtttggttttttgttcttgcratagtttactgagaatgatgatttccaatttcatccatgtccctacaaaggacatgaactcatcattttttatagctgcatagtattccatggtgtatrtgtgccacattttcttaatccagtctatcgttggatatttaggttggttccaagtctttgctattgtgaatagtsccgcaataaacacatgtgtgcatgtgtctttatagcagcatgatttatagtcctgtgggtatatacccagtaataggatggctgggtcaaatggtatttctacttctagatccctgaggaatcgccgcactgacttccacaatggttgaactagtttacagtcccaccaacagtgtaaaagtgttcctatttctccacatcctctccagcacctgttgtttcctgactttttaatgatcgccattctaactggtgtgagatggtatctcattgtggttttgatttgcacttctctgatggccagtgatgatgagcattttttcatgtgttttttggctgcataaatgtcttcttttgagaagtgtctgttcatatccttcgcccactttttgatggggttgtttgttttttttttgtaaaattgtttgagttcattgtagattctggatattaaccctttgtcagatgagtaggttgcaaaaattttctcccattctgtaggttgcctgttcactctgatggtagtttcttttgctgtgcagaagttctttagtttaattagatcccatttgtcaattttggcttttgttgccattgcttttggtgttttagacatgaagtccttgcccatgcctatgtcctgaatcttattgcctaggttttcttctagggtttttatggttttaggtctaacatttaagtctttaatccatcttgaattaatttttgtataaggtgtaaggaagggatccagtttcagctttctacatatggctagccagttttcccagcaccatttattaaatagggaatcctttccccattgattgtttttgtcaggtttgtcaaagatcagatagttgtagatgtgtggcattatttctgagggctctgttctgttccattggtctatrtctctgttttggtaccagtaccatgctgttttggttactgtagccttgtagtatagtttgaagtcaggtagcgtgatgcctccagctttgttcttttggcttaggattgacttggtgatgcgggctcttttttggttccatatgaactttaaagtagttttctccaattctgtgaagaaagtcattggtarcttgatgaggatggcattgaayctataaattaccttgggcagtgtggccatttgcacgatattgattcttcctacccatgagcatggaatgttcttccatttgtttgtatcctgttttatttcattgagcagtggtttgtagttctccttgaagaggtccttcacatcccttgtaagttggattcctaggtattttattctctttgaagcaattgtgaatgggaattcactcatgatttggctctctgtttgtctgttattggtgtataagaatgcttgtgatttttgtacattgattttgtatcctgagactttgctgaagttgctgatcagcttgagattttgggctgagacgatggggttttctaratatacaatcatgtcatctgcaaacagggacaatttgacttcctcttttcctaattgaataccctttatttccttctcctgcctaattgccctggccagcacttccaacactatgttgaataggagtggtgagagagggcatccctgtcttgtgcccgttttcaaagggaatgcttccagtttttgcccattcartatgatattggctgtgggtttgtcatagatagctcttattattttgagatacrtcccatcaatacctaatttattgagagtttttagcatgaagrgytgttgaattttgtcaaaggccttttctgcatctattgagataatcatgtggtttttgtctttggttctgtttatatgctggattacatttattgattttcrtatgttgaaccagccttgcatcccagggatgaagcccacttgatcatggtggataagctttttgatgtgctgctggatttggtttgccagtattttattgaggatttctgcatcgatgttcatgaaggatattggtctaaaattctcttttttggttgtgtctctaccaggctttggtatcaggatgatgttggcctcataaaatgagttagggaggattccctctttttctattgattggaatagttttagaaggaatggtaccagttcctccttgtacctctggtagaattcggctgtgaatccatctggtcctggaatttttttggttggtaatctattgattattgcctcaatttcagagcctgttattggtctattcagagattcaatttcttcctggtttagtcttgggaggatgtatgtgtcgaggtatttatccatttcttctagattttctagtttatttgcatagaggtgtttatagtattctctgatkgtagtttgtatttctatgggatcggtggtgatatcccctttatcattttttattgtgtctatttgattcttctctcttttcttctttattagtcttgctagcggtctatcaattttgttgatcttttcaaaaaaccagctcctggattcattaattttttgaaggrttttttgtgtctctatctccttcagttctgctctgatcttagttatttcttgccttctgctagcttttgaatgtgtttgctcttgcttttctagttcttttaattgtgatgttagggtgtcaattttagatmtttcctgctttctcttgtgggcatttagtgctataaatttccctctacacrctgctttgaatgtgtcccagagattctggtatgttgtgtctttgttctcgttggtttcaaagaacatctttatttctgccttcatttcattatgtacccagtagtcaytsaggtgcaggttgttcagtttccatgtagttgtgcagttttgagtgagtttcttaatcctgagttctagtttgattgcactgtggtctgagaggcagtttgttataacttctgttcttttacatttgctgaggagtgctttacttccaactatgtggtcaattttggaataggtgtggtgtggtgctgaaaasaatgtatattctgttgatttggggtggagagttctgtagatgtctattaggtctgcttggtgcagagctgagttcaagtcctgggtatcctcgttgatctttctaatgttgacagtggggtgttaaagtctcccattattattgtgtgggagtctwactctctttgtaggtcactaaggacttgctttatgaatctgggtgctcctgtattgggtgcatatatatttaggatagttagcttttcttgttgaattgatccctttaccattatgtaatggccttctttgtctcttttgatctttgttggtttacagtctgttttatcagagactaggattgcaacccctgcctttttttgttttccgtttgcttggtagatcttcctccatccctttattttgagcctatgtgtgtctctgcacatgagatgggtttcctgaatacagcacactgatgggtcttgactctttatccaatttgccagtctgtgtcttttaattggagcatttagcccatttacatttaaaattaatattgttatgtgtgaatttgatcctgtcattatgatgtyagttgtttattttgctcgttagttgatgcagtttcttcctagccttgatggtctttacaatttggcatgtttttgcagtggctggtaccagttgttcctttccatgtttagtgcttccttcaggagctcttttagggcaggcctggtggtgacaaaatctctcagcatttgcttgtctggaaaggattttatttcttcttcacttatgaagcttagtttggctggatatgaaattctgggttgaaaattcttttctttaagaatgttgaatattggtccccactctcttctggcttgtagagtttctgctgagagatcagctgttagtctgatggacttccctttgtgggtaacccgacctttctctctggctgctcttartatttcttccttcatttcaactttggtgaatctgacaattatgtgtcttggagttgctcttctcgaggagtatctttgtggcattctctgtatttcctgaatttgaatgttggcctgccttgctagattggggaagttctcctggataatatcctgcagagtgttttccaacttggttccattctccccgtcactttcaggtacaccagtcagacatagatctggtcttttcacatagtcccatatttcttggagactttgttcatttctttttattcttttttctctaaacttctcttctcacttcatttcattcatttcatcttccatccctgataccctttcttccagttgatcgcattggctactgaggtttgtgcattcgtcacgtagctctcgtgccttggttttcagctccatcaggtcctttaaggacttctctgcattggttattctagttatccattcgtctaattttttttcaaagcttttaacttctttgccattggttcgaatttcctcctgtagctcggagtagtttgatcatctgaagtcttcttctctcaactcgtcaaagtcattctccatccagctttgttctgttgctggtgaggagctgtgttcctttggaggaggagaggtgctctgatttttagagtttccagtttttctgctctgtttttttcccatctttgtggttttatctacctttggtctttgatgatggtgacgtacagatggggtttttggtgtggctttcctttctgtttgttagttttccttctaacggacaggacccttagctgcaggtctgttggagtttgctagaggtccactccagatcctgtttgcctgggtatcagcagtggtggctgcagaacaatggatattggagaaccgcaaatgctgctgcctgattgttcctctggaagttttgtctcagaggagtacccagtcgtgtgaggtgtcagtctgcccctactggggtgtgcctcccagttaggctactcgggagtcagggacccacttgaggaggcagtctgcccattgtcaaatctccagctgcatgctgggagaaccactactctcttcaaagctgtcagacagggacatttaagtctgcagaggttactgctgtctttttgtttgtctgtgccctgcccccagaggtggagcctacagaggcaggcaggcctccttgagctgtggtgggctccacccagttsgagyttccctgccgctttgtttacctaatcaaacaactaactcagcagtggcgggcgcccctcccccagcctcgctgttgccttgcagcttgatctcggactgctgtgctagcaatgagcgagacttcatgggcgtaggaccctccgagccatgcgcgggatataatctcctggtgcgccrttttttaagcccgttggaaaagcgcagtrttagggtgggagtgacccaattttccaggtgccgtctgttacccctttctttgactaggaaagggaattccctgactccttgcgcttccctggtgaggcgatgccttgccctgctttggctcgcgcacggtgcgctgcacccactgtcctgcacttactgtctggcactccccagtgagatgaacccggtacttcagttggaaatgcagaaatcacccatcttctgcatcgctcacgctgggaactgtagaccggagctgttcctattcggccatcttggctcctcctccccagggaatggttttgaagtgggcttgctttggtgctctcaggtgtgatttcttaatatccgtcttctagtttggtgtcagaggctcactttgcatattgctgatttcctatagaagtttctattcatcaccttaactatatagcctccctgttttattaatacccagtgtttttgtaaacattggtttggtccctcgagtctggaacaattaaagcaatgggcagtttgtcacaaggaaagcaataaggtctgatggctaatttcattccccaacagctcagcatagcctgacttcaccgactgctcctagagtgggtgaggtccttgaaaaatgagggccaaagggaagactgatggttggggatgcccaacaggaaatttttgtgcattatccaagaaaggtgcttggacctggtcctgcttcctcaggcagcccctgtgctaggcatctggagggscaagaggtgtcccagatggaaggtgtgtgagatatcaggacattcattctgtttagccgagaagagggatcttgagcccaggactgtggagttcagaggataagtcactgctagcctgggaacaagggaaggcttcaaacagcatgttggcatttcaagatgtatgggatctcagggtgaaagcttattgtatcagtttcctgttctgctgcaacaaatcatcataaatttagtggctttaaacarcacaaattattatcttatagttctgaagatcagaagttcaaaatcattgggtcaatatcaaggtgttcttgattttgactggttccttctggaggctttaggggagaatgtttccttgcctttcccaccttctagatgctgcccgtgagccttggttcctggcctcttcctccactttcaaagccagcagcagagcatctttgaacaaatttcttccctgactctgacttttctacctccctccttcccttataaagacccttgggatcatgttgggccaccrggataatcccagatggttgctccatcttgacatccttaacttcatcctgtctgcaaagtcccctttgccacataaggtaacatattttagggatttggacatggacatygttgggggaagggcatgactctatccatcactgatgattctttggaatttctaaaactgagaaatcagttttccatcagcctggctgatcgaaagagggatttgatttgatttgaaagccagagcagccccagttgccttcttgaaattgggccgagggtgcgtttctcccctacagtatgtggttctgggagacaggcctccgaggagcagtggtgggctggggagaggagcagcctacagcctccctgccctccctctggaggactttcatagtgcagtgatagtgctgacagctggcattgtgggttgggtgtgagggcctgtagctctaccaggtgggatctctgctcccaattgccatgtaggccagctggactcccagcaggtaggagctgccatgaggtcttgatgtgtgtagctgggcaggtctcaggtcacaggtgcctgacactctctgccattgtgagagaggcagggaactgtccccagggaactccagctgccctcaggccccatatgtccccacaggggtgcccccagagcaccacagctctccccagatttcttccttcattggggccctgatagagttccagctagcgctgcccctgggactcacccctgtgtctgcagactgggtcttcagcctcagcatgcagcccagcccttgcgaagttgcctcatccctgcgagaccagctcaagatgggtctagtgggcttggaatattaacctcctccatctaagagtgggtggccatggtgcagcctcagcatgcactcatccatgctctcattcaccacaattctgagcacctactatatgccaggcactacacaggatcctgagatcaaaacaaaccaagtgcttccctcctggagctgacacgtccatggggaagaaaatgttacagcccccatactcatggtcatctctttgcragtcaactcaaagtcagtgatgcagactcctgagccctccactgaagctccatgaggccagcgcccctgtcccaggcacccacatttccacgatgcacagcgtatggtcctccacttgtttccctgcttttggtaattctggagatgtaagaaataccatatatctttgggacagacaaatggtgccatcaaatagagggaaactggggttccattccagaggccttgacatgtgatgtgagcatctagattggataggaagcccaggcttctccatgggaacctgccccaggtgtattagtttcctgtggctgccgaaacaaatcrccacaaactaggtggcttaaaacaacagaaatgtattgtctcatagttctggaggccagaggtcctaaatgaaggtgtcagcaggcttgccctggagtctctaggagagaatccttgcctgcatctcccagcttctggtggctccaggtgctccttgccggcagatgcatcactccaccctctgcctctgtcttcacgtggacttccccttcatgtctctgtgccccaagtctccctttgcctttctcttataagaatccttaacattggatttatccaggatgatctcatcccaagatccttcagttaattacgtctgcaaagaccctttttcyaaatgaggtcacattcacaagttgtcagggttagaacttagacstatcttttttggaggtcacatttcaagccactggctctgcactgtgaacatgcatgggtcacacacgcacatgcayacacacacacacacacacacacacacacacacctggatacagctggatatatacccacaggcattccccaagtacagctattccccttgtgcagcagatctaatacatattcagttacacacttgccctttacatttttttcacttactttcaaatctggttacagatgattaagagcgaacttatttgtagaaatctaaaaagtaggtggctccatttctcaraaggaatgctctcttaatgaatgcacatcaggttggacaggcagaaatacaccacatggataagtttttaagcatatgccccaattctttgaaagacctcactatctatcaaagccaccttctccgtcattagaaagctatggggttttttggcattgggccaaaatctaatttccygaaccatcttacctgttggtgctccagcaccacgggggtgcgcagaacctggtgccccccctctacatgacagctctcctgtgtttgaagtcggctttggtctacrcctctccaggctaattttttaattagcttaaattaatggcagttcctggggagctccagccccagtaaaagtggcctgaattattcaaagatttgagtgtttcaaatgcctgtttatcctaattagcatcttagctacagcggtgccctctgcctctaaggagccacattttaacatgttccatattttaatggattttccttgaatgaactgtttaatcaagtgaagacacatttcatgaatgaatagaagtaaatctataattatacactttagtcaggtaagaggagtgacatttcggcacaattcatggctatatatagcaagtgcatttgaatgacaaagtaggttacctcagcttccataggagagctgagaattcgctttgctctcaagttcatttcgtaacctaattagaattttcaaagagttgtaaagtgcatgtggtgcagccctggttctccccatctttacctggatctgtgcctttctggatggttcctctgctggtgcagtagcctcattagggaagttgtctggggaactactggccatagaagctgagtgccttgagatctctggagctctctgcagcctccagccactggctgtgaatttcacttgcccatgggagccttctctgtgtgggacacgtggtctgaatgcagtagcaagttgctataacaatattctgcttctctcttctccctttcttgctttctgtctcatgtcttcctgcctcctttccttctctccattttctcctctgccatagtcagkttctgctcggggtgctaagggccaggagtagaagggcctgaggattaaagatgagatgtacctactagagggggcaggagagagcaggggagcaatcctggtgccctgggtctggaggagatggggacagggggctcgggggttttcagacaggctggcaacccagctgtaagcttgatgattctgttgctcttaccccaatcagtagccactttagctacacattggaaactcctggaaagctctaaaaatacagatgcctgggtcctatcccagaggttctgattggtttaggaggcagttagggcatcagcagtttctaaaactccccaggtgattccaacatgtagtcccaaagtctttaggtgacggcagccccagccagcatcctaaccacaacctcctgaaagaccctgagccagaaacccccagttaagttgctccccattcctcaccatggaaactgtgggggacagtggatgtgtattggttaagctgctacgttttgggataatttgttgcacagcagtagatgactaatacagattattagttgtcctgaatgtacccccaagccgatcacttcttgccacctcccatatcatatcatctagcctccagaatccctckcccggaccattgctggagcccctccctgcccttcctcttcccctcatgtccctgcccctcagaggtcccacagaagcctgagcaactgtctcaaatcatagttctaataatgtcactccatcacttaaaacttcatcatgggttaccactgtgcttagggccgagacctgatccttcacgtgaactggaaggcctgtgtgggctgccctcacccacctctttctcagttcattccgacagcctccctcaagccctgctttaggctctgcattaagcccgctaggacattcttttagtttctccaccagctccctcccgtcacaggaagtacacatgctgctcctcggcctggaatccttttccctgccccacctcctggcctggggctgacttctctgctacagcctctcccaggagcctgcccctgaacttgagcgtccttgtctcagtgaacatttacacattccctgggacagtcagctgatgaawgcctcttgccctcactagacagagatccaggacagtgaacakttttggtctttagaggcccagtcctacctcagacggttcctgaaacagaagagatgtcaatatcagaaatgaatgagtgggtgaataagtgagtgaatgaagtagtgggactggtagggacaaacagagcccattctggaaaatccaaagtggtgagtggctgctcggaaaggtactcaagttcagaagccaggcagtgactgggcatgagagaatttcagtcccaggaatgaagcaagagctcagattgagagcctgaggtcagagaaggtccctttccaggctgactgggggctgcaccccagggctcctgacctcaggcccctcaccttgcatccatggagggcaggagtgtccagtgccaagcggggggattcataggagccaggggttcactggccctacctgtgggtagcagggagttgcaggggttaggagcctggcagggcatgcagatacagtcttggggccctaaagcagagacagtgtgggtggagagaacaggctggcccacacactgaagcggtgggtcatgcagtgatttgataaacccaaggctgggtgattctagagagagggcagtacccggcgtcctctggcagctgttctgtgtttaatggagaggtgcaggcttcagagcagggaggaggccttgcagtggagtggcactgtggccttctcagaagtggggaccagcctccctgatgggacagtgcagacccacattaggcttaaacaggtcacatggactcaattaaatgctgagtgagaagattcttccgagtcatccgtttacctgcactcccttcccaattccatttgctttccacctttttctctgatctccttttcctcctccaacccctccccttctccccctatgtcttgcaggcatggataaagactgcactcccatgtctagtgtgtggacggaggttgtgtgctcagtcagttgcaggaacgaagccattgtgatggctttattggagtgacaagtccctgtcactctcttcaccacagcaccgtgaaccagctgggagggaggttgtgggcagacgcgctcgtctctgctgttcagacagctgatctgacctggcggcattttctcctgctcagcatgagtgaggctgtccccactgctggctttccctcaaagccatggatttctcctggctcttagctttatgaaaaatgtgggacttcctagaacttgaagtctgagttgaaatattaacattcttgcatttggctgtttgcttcccaaagctgcrtgggagcctgaggagtcattggtctcaccctttgtgacctttacactctccatcagcccgtgcctgtggtctccctaaagggttcttggtccctgtcctagattatcaatcatttacttaaaactgtcctctgagtgtgaaccactttgctgctaccctgataaaggcaagcagaactgagcccagtgctcaaggtgtggtctgagatggacgacagagagggattgtcccttccttcattctagatgtgatatgttttaaaaatagttcctggccacgtgcagtggctcacgcctataattgcagcactttgggaggccaaagcgggtggatcacttgaggtcaagagtttgaaaccagcctggccaacatggcgaaaccccgtctctactaaaaatacaaaaattagctgggtgtggtggcgggcacctgtaatctcagctatttgggaggctgaggcaggagaatcgcttgaagctgagaggyggagattgcagtgagcccagatcatgctgctgcattccagcctgggtgaaagagtgagactttgtctcaaaaaaaaattaattaattaaaaaaaaaaggagcagggggcggggaakgggggggggcagtggttcctagtcttaatcaccctttgttaattgccttgctcagttaatacattctggtctcctaaccgaggggaaaatatccaagccattaaaatttttttctcacaattatcaatcatttacttaaaacttatcctgctttgtttagaatgtggttctctaaacatgtatcagaattacctggagagcttgttgaaacacagggtgctggaccccaccctggagtgtctgattcagtagttctgggtagagctggagagtttgcatttttagcaagttctcagatggtgctggtgttactggtgcaggggccactgtttgagaaccactgcttcagggacatgctttctggcacgaactcacatggatgggccacaccagttcttgtagcgggggtggggaggaggtgtcaagtcaacaactattgcctccaagcctcttatcgcagattatttattccaggggctctgacccatccattctctccatgccgaatgtcttcggctccttgtggatttgttccttggccaggtcctggatccgctgctccagaaacagggagagttttcccctttgggtagccccagaggccctggcctttagggagcccagtccttccttacctcctttccagcagccsttggtgcctgctcacagcactcctcactccctgtcaatctgtgtctcctgccctcctggggctcccttccaggtgaggggcagccttctaacctcccctgcccatcattacccatctctccccatccctcccaggatgcccagagctttcagcaaatcagactcctggtggctgcctcacttggcccaatatgcagattaggcccccaggggcaccccctgccattctttgtgtgtatgtgagtgtgttgtgtgtgtgagtgtattttattgggaattaagagttattcctttcccagaagaatgtacttctatttttataaaggagattaatagaaaaaaggaaatcattttgcagaaatgtagttaatggcaagatattggctccagttttttttgttttcgtctgtttgttgttgctgttgttgtttgagacagagtcttgctctgttgcccaggctggaatgcagtggtgcgatcttggctcactgcaacctctgcctccggggttcaagtgattctcctgcctcagcctcccaagtagctgggattacaggcacgtgccactaatgcctggctaatttttatacttttagtagagacggggtttcaccatgttggccaggctggttttgaactcctgacctcaggtgatccacccgccttggcctcccaaagtgctgggattacaggcgtgagccaccgcacctggcctggctctgttttaaacaagagataactgcagttccagaaggaaacctaggcatttataaattttcttagtaaatcttccatcagtgcactaaagggtctttctacccacttaaggagcatgtaaattgttttcccttgtgaggaagatctattacattatttcttttccatgcttttgtcactttaaaatgccatttataatattactgactgcctccatttgctttccccagaaagtccattaggataaatacttgaggtgagcatagactccttggtgctgagattatgggcggtgagtggctgacctcactgaccatctgttctggcctgttctggttcatygggcctccgaaactgtccacatctggcagaatccagaagagccagccaggactgggaatcacacttcagtttcctcatctgtgaaatgaggggagggatgagatgacctctagggtgtgttttgtctattcgttttgagttctgaccacctataaaacattttattctgccatgtttatatatagctttcatacacacattaatacacacatgtggataccaaagctactgcagccttgatgccttgccatttgcctgggaatgatcactccaacttctaagtggtgtgtagaactttagagtttacaaagccattccacatattcagtgtttttgctgagccttgagtcaaccccatgagctacttgctgtattgcccccatcttataggtgtaaaaactgagacttgagagtttgggtagtttcttggaatgtgggtgccatgcaagtggagagccaaggctagactgtgcgtttccaggagctcacgcattgagctcctcccaggagggccacatgtgcatgttttccctgtttaataatgactgttgttccacaacacctcgtgctgctcaaaactcatcatggggcccacctgtatccagaaggatttgagacagcagaaataaactctaatggaaaagttaactttttccccccattgactagttaccaatcttccatcaaattgaggtaaaaacgaaggatggacaaggttcacgctgactgtgacagcatctttctttttacaaaacattgatcacaaggcatttcaagcattcagaataaaataaacacccaaggacttgctagccagaatgattacatgttcacatttgctccatttgcttcatatttctgtcaaagaaataaaagatggcagctcccatcacagtctgttttgtctcccttccttggtgttgaccatcctgtgacatttaaggccagattatccaaaatgctctgatgtatacattacaaggatccaccaagtgttgaaataagaagttcttttttattgtgatacaatatacatagcagaatatttatcattttagccatttataagggtacagttcagtagcagtatgttcacatgtttgtgcaactatcactactgcatctgcagaactttttttttcattccacactgaaactctgtgcccattaaacaatcactccccaccccctccttccctcagctgctggtaaccaccattctactctctgtctctataaatgtgactaacctgagtatctcatatgaatagagtcatacaatatttgtccttttgtgtctgccttatttcaygtagcatgatgtcttcaaggctcatccatgttgtagcatgtgtcagaattttattccttttgaaggctgaatagtatttcactgtctgtatacaccacaattcatttatccattcatcgagcagtgaacgtttgggctgcttctgccttttagctgcagtgaacaaatgttcttatgaacatgggtgtaaaatgtctgtcaagtccctgcttccaattcttttgggtacgtgcccagaagtggaattgctggatcatgtggtaattttatatttatttttttgaggggctgctatactgttttccacagcagtggcagcattttacatttccaccagcaacacacaagggttccagtttctccacatcttcaccaacacttgtggttttgctttttggtaatagccatgctaatgggtgtgaacaagaagtgctttaagcatctcctaaagcggaagaaactgaggcccagagaagggaagaatcacacgagagattgaggtcacaagcaagtcagtgatagagcaggacctggaagctggatcccctaaccccagcctagttcttgctactaaaacccaaaatccagtttccattgytatatgtcagagggtgcacagccatggccacaggccagatacagactttaagtttatttggtttgatccttactttcttttttttttaattcaaaatagtatcaacatttaaaaattaggggattttatattttaaaagtctaaatttctgatttctcccctcaaaaatcagaaggtctggtaacccttgacccacattctaactcagcaaccaactattactgtcttttgttttgttttgttctgttgagacaaggtcttgttctgtcacccaggctggagtacggtggcgtgatcacggctcactgcagtcttgaactcctgggctcaagcaagccccccgtcttggcctcccaaagctctgggattacaggtgtgagcccacgcccagccctatcattctgtaatatccttccacacaggctagttcacacactggctggtcctggtaacactggagtttgcagccctttgcttttcacatccatagatattcctcattctgagtgtcagtagacacatagttacgtgtaacatcataggcaggttccatacttctttcctctttcctttactctatattgtctttgaatatcttagctatttcctcaccataaaagtgaaataatgttgcaaataaatagtgcaaaatattaacaaagacacaattgaatagcctgatttggagacagtgtgatgtggtggagaaacaccagcaaaggtgctaatcttgactcttgcaggaactccctgggcaatcttggaaagtcccttccctgtctggcctccttgtatccatgtgtcagttgcagggtrggactggkggatcctcaagtttttrtggggcggtctagttaataatgtaaaacaaaaccactcactttgcattgtcggtagagaaaatcgctttgcccarttgacttccccagggtgacccctcrgaactggcccttcctgtggtccccagcacacccaccctctgctttctctttgytgacaggtgcggaatgacctgactggagttctgtatggcgaggacattgagatttcagacaccgagagcttctccaacgatccctgtaccagtgtcaaaaagctgaaggtaggtgtggctagccacagggtgaatggcagactgatctcaatgccctgggtgcccaaattacctgactatgaaagagcctcaagtttggtctgggtctcaagttcatttccaccttggcatcccagacaggagaagctcccaggaattggcttcccttggctttcccttccttgctctccaacactggccagaggtgctggctgcaggtgcacagccactgagcactttcctgatggttttatatctctcaacgcagcctcaggggcaagcagggcacacatgattgtcatgtctgttttgaagagtcacagagagaggaactgtctttcagaaagcccacagcaaagaagtcttcttgttgcaactgaaagcccaggctcctgacccctatccggtgacactctctttaggaacagaaagggtcaacgagaagtttccccagttgtaagtcagtctctaattttcatttgtccattccttctgcatactctctcaaacagcttttacgcaccagaccctctcttgggctcatagacatcatcggccttgaccttgtcctcaggttactcccagcatggtgaagaagacagagacctctcaggggaaacaggaacaaaggggcctgggaacaaagggaggaagtgactcatcccacctggggagagtgctcagacaaggttccaaaaagagacaacatttggtggaggaggaagagagggatcccctcctacaggagcccagcacggtaggagggaagatcagagggtagggtagccatgctcatcatggcttagaatcagcaggaattccacagaggcagaagtacctggagtggggtagaagggaggctgaaacagaagtcagttcccaggagccttgaatgccaagcttagaagtttgatatkttatcctggggacttcctggaggtttgtaagcaggtgccagtgtcatcagagctatcaaattcctctttccctctcctccattccttcaggccctcacttaaagtcattagcatggagaccccagatgccaactgcagatatgtcccttctgtcttgtgtgggtcccaggttacaccagtcagagcaggtagcagcttagagcagttgccttctaaatcctccagttcacagatggggagcccaaagcccagagaaggggagcaagggaagcaacatatcagttgtctaccacctcctccagagcagatacagagcctgcgggtcacatttcagccttgggagcctctgcagatgaggacacagtagtcagggaagggcctgcttgacagcccaggtggctggagccaggtctcccccctgcagtgtcacaggctgtgttgggcctggaggattcaggggtggggtggctgctctgcaggaagcatctggggcagggttgggagaggaggggagggcctgcagctgcgctgacattctcctgccacatgcagaggcatctccccatggtgggcacttgaaatagctccctgagctccagaggcccagcatctatggactttaatgtttaaagaacctttgtgtgcagagcagagcaactggagatggaactggactctctacccatcaaccagccaactccaacagaagtagcaacgacattaaccataatgaaaataacagccgaaatagccacctttccagtgcattgaccacaggccaggccctgtgcagagcccttcacctttatttgctcaattcgtcctccccaaagccctcagatggagggaatttttgtatccctgtttcacagatgtggactcgagactcaaagaggttagcaactaccccaagacacccagctgaaaaatggtgggttgggattcaaacccaggtctgggcaatgtcatggcccagctttctccactgctctgcacgtacttctgagaaaggatttcagtatcacataagccaggagagcagcactaatgacagagtactcatctgttggcaaaggctcccctcacccagacacctgcacagctccttcttgtacctcttgcagtctttgtccagtcatccccttctccccgaggctttccctgaacactttatttaaaaattgaaatccctgttcctccaactcccacttgtccctttctgctaattttctcctccatttcactgattgatatctattttcatttcctgggactgctgcgacaaagtatcacaaactaggtggtttataacaacagaatgtactctctcgaaggcttagggctcttccttgcctttctcttggctgctggcgtcaccagtaatccttggcagtttgtggctcaccactgcatcacaccaatctctgccacacatggcatgtcctctcttctctttatattgtctttttaggacactgatcatgttagataagagcctcccctattctagtatgaccttgacctaactagttacctctaacaatatctggacttctattcattttacctggtgttttatcatctgtctcctcccattagaatgtaagctccaggaagcagaaatttctgtctgtcttggtcactcttctgtttcccatcacctaaaacccaacstaatttgctcaacaatttgttgagtgtgtgtgaatgaaataccaagtctggacaaagtgcaacagaggctacaaggacataatactcaggaacaacgggaaggtagttacttttggaaatctcagaggaaaagcaagtttctgatttattgtgggataagatggagaaggaggtacagaggacagacaagaaaaccagatatcaaatagtagaactggagtctgcattggaggtagtagagagcagaattaaagccgagaaatataaaaatcagtaaggtggagggcaaacttgagatactttcccagaattcagaggaaatcgccaaatagatcaatccagtgagataaaggataacagtkgtggatactggagaagggagttttcctaagggaaaaccaggacaaaagaaacagaatcaaaatccaaaacagtagaaacagtagcaatgagcacacctaacacccagattttggttcctaacaccattctccagtaaaaggaaccagggctccttagacaaatggctggttctatggggcaggaaatagacaagatgattctggagtattttgtaataccagaaggtaaggaataacacacatactggtggggctgtatcaagggagtacagttgccaattgaaagagctcccaatggccaaagctggaacaatttgaacacaaaaaattaaagtagtattagaatataacccaaagtataaaataaatctccacaagtttactattatgtaaatgattgactaataaatgggagaatataggcaaacctcctacacagaagaattcaaaataacttacatagatacttcacactccaaagaggtaggtcataactacacacttcttaagttacttccttccaaagggtacagtaggagaaggggggataaaaaagaataacttgacggtcgagaaacctgacaaacgttyccttagcgaggcaatcaaggtcaacatcagcagtgataagtcacattgaaagctcccttgacatgatatgatgggaataactttacctctgtggtcttcttccccaaatcccataaccccagtctaaccatgagaaaaacatcagacaaattacagttgaaggccatcctacaaaatacctgaccaatactcccccaaactgtctagttcatcaaaaatagagaaagccttagccaaaaggagctgaaggaggcatgacaattgaatataatgtggtatattctagatgggatccaggaatagaaaaaggatgtttgagaaaaagactaaggaaatctgattaaagaatgggtgttagctaataataacatcaatatttattcattgtgacaaatgcacaaaatactaatataaaacattaataatagggaaaactggatgaggggttgtatgggaactctgtatatagtctccacaatttttctgttttcaaataagaattttttttttttttttttttttttttttttactaggaaacaaacttaagcgggctcaagacagacctagtactgtagattgggccatacaaaatttccattattctacagtttttgaactacaacaattttatatggaaatgtacagactatatgagcaaactagccagcttctgcattctagcakaactggtgaaaagagagtcatacttagacaggttttgccaaaattttgacatacttagtggagaaaatcttacaaatatctaggccaggaaaaaaacaaacttcccatagagatgcaaaaaccaggccactctctgactcctctgaagcattaaatcccagagacagtggagcaactgggaggtattctgcactgtatggggctcacacgatgttccagccaggtccccttcttgaagctaatcctgaagtctgatgtcaaccagccaaaagcgatggcatactttacagctgaggtcatgacagaaacrgctgagcagggatcattggaacccatggaaggaaagcaaagtctaaataattgttataaaagtgtatgcagatgcaaaaattacatataattttatacataatgcaaaaatagatacggcaataggcataattgagatataaaaatccaaattaccttcacaggcctaagaagagatgaattttttaaaagaagggtgcttaactcctggtgttaactaggagagggactcaaaagagaccattttgctcatgagtttcataattaggtagatataagctaaagaatgctttgaatgactcagtggtaaatataccataatgcaaacagaacctgaagctgcagaaacacaaaaataaaacaaaggaaatctcatccatgtttcgaaacagaaaacaaacatgaaaaccagaaagcacaaaacagatcagtgcagaccacatataatgattctgaccagaagttcaaataggccaaactcattatcaaaaggaagagactttcagattgtgtttcaaaaaacgaactctagctatttacatcagataaacaaagtgacactgaaaggttgaaggtaaaaggttgagcaaaggtctaccaagcaagtcaaactacagcaagaatcccagtattcatatcagaccaaagcgtgttcaagatacaggtgtcaaacaggattaaggagagtccttttctatagataaggcttcaatccaccttgagaataacatgctcacggactattattgctttaaattacatctcactgaaataaagaaagaaaagcctgttaaaaatagagacggaaattgacagaaacacaatagcattgggaggcataacatctctctctcactcttggacagttcacccaggcaaaaaaaaaaaggcaagagcacagaggaacggaataatgaaattaataaggctgatttagcagrtgtgtatcgaaatttgtatcaagaaagtcaggaaataccatttctgtgtgatgaagtcgcgaggccctttaagctcattccaagcctgttctgaacagggggtggctaaagtttagctgttyccaggcggggctgggaagctgctctgcacagagaccacgtcctgggcactcatagggagagttccaggtgtcacatttccctttctggacatttcagttgcttcatgcaccttccccaaagtggccttctgccctatattcatatttccatttgttggaggaatatgtggtacattatttcaaccatggggcatccacagacccttatgtctggaattgacatgggaggggcagttgcctcagttcaatccgggtgctctggagaccaaatatttttgtggaaagagcaggaacttttaaagaaaatcttttattgtaaaatcaaacaacaatttgaaagccacagaaatcaaatgaatgtctaaatgaatcctaaggcaaacagcacacaggtcagagaactttatcagataccccaaaagtcccttctatccacagccccctgcccccaccatcaggaaccctatgccctacttttacagaaatcatcagcagtctttattccttttttttgtcagaactcagaaagtatagggaatgctgttctagttgtgaccctttttttttattgtagtaaaatatatgtgacataaaatttaccattttaaccatttttaagtgttcaattcagtggcattaagtacattcacagtgttgtacaaccatcccattatccacttccagaactgtttcatcatcccagacagaaactcagaacaggggctttgcgtgtaggtgtgttgctctgtcgcccaggctggagtgcggtggcacgatctcggctcactgcaacctccacttcctgggttcaagtgattctcctgcctcagcctcctgagtagctgggattacaggtgccctccaccaagcctggctaatttttgtatttttagtagagatggtgttttaccatgttggccaggctggtctcaaactcctgaccttaggtgatccgtccgccttgacctcccaaagtgctggattacaggcgtgagccacctgtgccaagcataacaggggcttttgaatcaagtagacccggggttggactccgtccctgccttggtgtcttcctctgtagagagggcactgggccatcccaattgtgtgatggtcgccgtaggcagactgttgggctctctcgggggctgaaaaatcagtagttgatattacgttcgaaacttgagagatgctggaatagagaaaagactaaataataaaacactaaataataaaattagagaatttcagggaaagaagccatggaactctctatcttttaatgaatatcttaaaatgataacaaaggactttctaaaatccaaactttgagacagtaagcaaagctgaaagattgtgagcaattcatttagggtctctgggcccacagagcttccctattgcaggtgaatttaccagaggagtcargagccttgcttgcctgcgtcagcgctgtgccagcagccacctctttccagagggctcctcttctctctctccatcttatcacagcctcttcttctgacctcatccaacgcttctgcttcaacatcaaaggaggacacttttaagcactccctttgtgcccacagattcatgaattcacttcatccccacaataactctacaatagcagtcagcaaactacagctcatgggccaaatccggcctactctctgtgtttgtaaataaagttttataggaacacattcatttaccacaacgtccttggctgcttttgtgctacagcggcagaactgagtaattgcaacagagactatatggcctatgagaccaaaaatatttactatctggacctttatagaaattgtttgccaccacctgctctgaagataggtactattattatccccattttataggtagagaaactgaagctcacgaaagtttaataacttgcctgaggccatgaagctgattaagtgactgagctgagattctagctcagcagtctagctacagactggctcttaacctccacggcatgcctcccagcttcgtgtccacccacactcctcagtcagcatagcctctcaacattccaaggttactcatacccaacatttttaaatgacctgtctccccccatttcttcttagtaacaaaacaggaatgaaagggctttgcaacttacttgccttaagtggaggagcggttaaaaaaaaaaagtgctagggaatgacagaaagacagagataagcagaaagctctcatctttattttttatattgatgcaatatttgggccccagtgcaacatcatgaagaccctctaaattgagccaggctttctactcttaaaaaaggaaaagaaaatatgtctgtgccatttagagccatgtttggctttcttttttgagtgactcacaaaaatagcccaattctccaacaatattagtggggatccttatgcctcacattaaggggacagctttgaccagaaaagctactcgactagtcagcaacaactgagtgtcctagaaccscagcagagagaggagggagacaggataagcccaaggtaaggcctttccagagagggaagtgtcttcatttcccattgctgctgtgaaaatctgaacagcttcaagcaacacaaatttatcttactgtctggaagccagatgtcctacatggatcttgacaggccaacatcaaggtgtcagtgcggccaagttccttctggaggctctagttccagtatctagaggccacctgcatccctcagctggcatccccttcctctatcttcaaagtgagccatagtcagtggagcctttcccacactgtatcactgtctctgcctcggccatgtttaaggaccttgtgaatacatgaatacatttaaggaccctgtgaatacattatcacctggctaatccaagaaaatctccctattttaagatcagctgataaacaaccttaattccatctggaatgtgaattttccctttaccacgtgacataacgtactcacaggttctggggattaggatgtggccttttttgggggactgggggagtggggacagggtctcactctgtaacccaggctggagtgtagtggtgtaatcacagctcactgcagcctcaacttcctgggctcaagcaatcctcccacctcagcctcccaagtaactgggactacaggcatgcaccaccatactcagcctatatatatatatatawttgtagagacagggtttctccacgtttcccagactggtcttgaactcctgagctcaagtgattctcctgccttggcctcctaatgtgcygggattacaggcatgagccactgagcccagccaggatgtggctattattctgcctggcataagacaactacaaaggtaggctttgagaggactgcccttcccttgctccatggtaaagtcctagtgggaactgtgctctccctcttgactctggccaaaaaaaagtccttagggaattgacccccttttttcccaaccagataggagagacctgatgagaactgccactcccacaggccaggagtccatcctgactgcctgaaactgaagttcatacaggcaccccaaggggacgcaaagctgcagaatacacatggtgcatctttctcacaggccaggtttgctcagagacatggagacgaaaaggtattatttttaacttaygacatagatatattattagagtgttaaatatacatgaattttcaagatacaagaataaactttaaagaaatgccatgctttccactgggctgctgtgggctattccctcttcgctcccttccttgagagtgaagcgtatgccttcactgcctttacggacagagtgaagcatatgcttctctgcctttatggacatttccagtggggggtggggtctaagtaagacaaattttagctaaataaaagggactactcattgtgggtatgggatcagtttgtcagagccaggagggactttggagaacattctaggctgaactyctagggcccactccaagtctacagccagacagttggggcacaggactggcctgggcttccgaagccttaggcagtgcccsctggcccaggtcatggccagcctctaacagctcagctgccttaggggtttatagcatctcctctctttatatagcattgtgacatttgaattttcagcagcccagcacagtaggtagtctgcgaggctaggctctgagaaaccaggatgccattgagtggacctagacagatgcatgggtggcaggagattccagacaacccagaggtcagggtcaggctcagggtcgagcttgaccttccttgcaagagtccatgctccacaggcaaggaaggctggctggagggcgtggtccctcatcttcctcacctctgctgtcctgcactcttaaatgcacaccagcaatttcagtggctcaggattgcatttgccatttatatcctttcacttcaacatctgcatgacttttctcagttagctgttgctgcagattgagtgctgagctccagcagctcasacccagtggggtttgcatcctcaactgggaggcggtagataggagcgaggagtcaagcactcaggctctgggaccacacccacccggggcaaggccagtgccaccacctcctatttgtgtgacctggcatcttaggttgaagtccctacaaacagagcctgagatgcttgggaaagtaatttattgtggaagtactcaggagaaggggagggaagcaggatgaggcaggaggagctctgtcttggatggataccagtttagcctggccccacaggggtctccggagcacagacagcaccacagagctgatcctaactttcagcaggggggccggagttttccaccaatgtgagtcagttgttggttgctctctgtggggtgtggggcatggagtggctcccatggccaggaagctccccttagctgagggcagttctccagagaagggagtgagctgtcagcagcccaccctcactgcagccrggcgggtgtaccagccccaaggaggggactgcacctgggaagtttgcttaattctttggaccttgctttgctcatgaatctttccaaagtgagcataataacagcgcccacctcccagggtggggctgacggactgtttagcacaacagctcagaaagggcttgagagttgttatttttatgatgttaggattgcttgcaaactgggggtacatgctagttctttgaattgggttatccttgctaagtgtcatgtgcgtgcgtgagtgtgtgtgcgtgcctgtgtgtgtgtgtgcctgygtgtgtgtatgtgtgtttagctctctttaagcatcccagagacaaagtggttctagatgagggatgagacagggtcaagaaaaagaaaaggaaagctacccagggtttggcaacattagactcctctccagagggagtttagtgggcctctccctcactcatcctgtcactgttgggggtttgggctgaatacccctccccattttcctaccccattcccaccgctgtttccttccacttttgcccctttcttgtgatagtagcctcttgagggtgtgaacataggtctccatgtatggtctccaaccctagacctggccatctcatttgccccaactcaggtcatctgctttcactccaggaagctccctgcagagccaagtccctggaagggcacaggattttccagaccctgccctctgccacgtttccagtcctttgtgatatcacagctctgatctgtcactgtcatcctcagggatggttatggctgcccctccctaccccctactactgcctaaactgccccaagccctttcagcataagagaatgggcccataccctggcagggaggcagggggcttgtctgaaagcaggggctactgctattcccaaatttcttctttctactctctggactttcaggaaaagatacaagctatgcaacattgaaaagcatgattctggaactttcatgagagcatgcacatgtgtggaaaaactattaagattccccaaatccaaaacctttcccctaacccctgaatcttccagtaagttgctactttagaaaggagaacgcagtatatctgcacttcctacactcgggacacctcctcgtgctctagaatgcacataccctagtttgagaagcacctcaaactgtttatactgctctatggtgccccccaagatccccatccagcctcatcccccgtttggcctctccccaaccctggattccgggctgctcctccttccttccagacttggcagcgtctttccccctctttctcaccgtctagaagcagagtatgtgttcacagcttcctgcagcaggcatgacctggctctgcataggatctgtctccagggccctctaatggtcaaggagaaccaaagtgagagctctggctttcattttggttctgtggagccctgggagagcttgtacctctctgggaagagattagctagatgggggatcccacgggccccatccaaatctaacagcctgggagcactgaacaaagtggtccttgcaactcggttgtcatagcaacaaagacaccaaatggttcacaagtggcagagctggttatttaactgtcagcaggtggtcaggaggtcagctatgaagatgtgggtccctcgatctactcaagaagtggacatggtgagcccagggtctagaccatggggttggtcagatattagtgcagtgatgataatggctactagtgaccaaataagcagcgtaggccaggcattgtgcgtgatgctgcacactggattaattcacttcatcgtgcattcaacacatatttgttgacatatgtgtagcgccctgttctgggagctggggacttagagataagtcaagttacgcttacttcagtggggaagacagacaagtaagtggacttgagccacattggaggcaagcacagggtgatccaggctcacagaggaagaagtggccaccaagcctgatggggcagagagatggtttctcagaacagaggagcctgggctaaggtaggaagggtgagtagcagctgtgcgggcaaagtaagtgggaggagagggaagggcactctggagggatagacttgcagaatgggtggggggcgaagtgggaatatgaataaatgaatgaatgaatgcagtcctgttttaggactcactgccaaggcagggtatgagaaatgtgatagagaattgagcacaagtcagttggtaaagactgcataggatctttaccatctctatctttagcacatcttgaatgtgctaaggagctcagtgtttgatctgcaaacctcaggaagccatggacagatttcacacaatcagacttgaatctaggaatgaacccttcctctgctctgtggcgatgggtggatggggcaggattcatggcaagggtgcagggaggctgttgctgttcactgagtaaggaatgatggtaaccaaactcagggcagtggggctggagggttgggactgattaaggagctagttgtgagcagacagaaccaacagattccagttatggcttggatgagggttgaagaagaggagtgagtctaagatgactcccaagttcctgacattgtcagaaatggaaaacacaggaggaggaaagggcctcttgggaaagctggtggattcagcttgggacatgttgcgctggaggtgcctgagagaatccaactggaagagtctggtgggaaactggagaaaatctgaggctggggggagagatttggagtccacagcacacagagaacagttgtggctggggtcatgaactaggtggcccagggagagtgatgggagcaaagagctaaggacagaacaccagcatttagggatgggcagaaaggtcaggagctgatgatgaggagtatgagcaggagtggccaggsaggcacgaggggagccagcagagagcagcatggaagccaccgggtgagtttcattatgatgaattgacaaccactgggcaaggtagataggattatccctttctcagagatgaaggaattgaggctccaggagattaagaagcaaagttttcagctaatcagaggtggagctgtgatttgaacccaggtctctgacttcaaaatctaataagctgtttttaccataccatgtttagcaacacagggtttggcacaaagtagatgatcaatagatacttgctggatgaaaggatggatggatgcatgggtactgtcagcagcaaaaaatgctaaaaatttttaacgaacaagcagaaagatcttggagcatgcctggaagcaagtccacagaacggaagcagcttagaactttttatagcattgcagacgtggtgatgacaaaggcttgccttccttccactgctctgttaacgatcttttaaagtcctttcagagccagtgttttttttcccctcttctttccattcttgcttgcaaacgaaagatgattttagaatccaggccttctttattttgctaaagtacatgatgagtaaaatggcctctcagtcagcactttccaattttgaaagatgctaaaaactgatctttaaaagcatatttttctactttatgcatcaaagggccatgaggcctgctggaggggatggatgaactgcaggaaggtggcaccacctgcaaggctgggcctcactgtggagggcaggaagcggctgggatggggagcaggtgtttgggccagggcctggctggtctcctggtggcygccccacccrttctctttcagcctgttcttctccaygggacaggacscagctggatcccaatgccccagaaagcaacaaagaccccatttacctgacccatgagagcctctggctgatgctcagtaattgtctgttgaatgaatgaatgagtcacaggggtcactgtacacattcctattaaccacactgagataatgaatgtaatcccatgtatagagctttcaaaaatagattttccttagaaataaaggtggacactcactatgtgctaggcactgtgttaagcactttacaaggactatttcacttagtcttcccagaaatccggtaaggaacgtactaccattatcctcattttgcagatgaggaaactggggctgagatggaaaaggagcgaccagaggccacccatggtttgttggtagagctgagatgcgaacaaagctcaaagcragtctgaaacctcttaattgggaagctctgtaggctccaggaatttcttgagggattaactatcaggaaggtagaaagggctagaacactgtgcagggcagcagagtgtggttggctggggtcttgtctctgccacaaactccccaggggccttagaagctcctttctcctcatctggcctcagttttcctatatgtaaagtgtggaagaaagttagatgatgcttccatggactgcaggatttgcctgccctggtgggaggagaacaggggaggttgcaaggcccctgagagcagtcagctttagcctccagcctgtacagacttgccctagggcttgcccatgagaccagggtggactgactgcaggagccacaggaaagccagccctggagagggctagagaatccaggctgggctggggttgggggtgaggttctgccctgcccaccttcccaggcagagctctgggctaagagccagaggtgmaggaatgttgtctgccacagccttgaaccctttatggggtgctgaacatctactcaccttcatgatgtgtccttccatccacaggggaatgatgtgcggatcatccttggccagtttgaccagaatatggcagcaaaagtgttctgttgtgtaagtaaaacagttgtatcattcgtgtctttggggaggttcacgaagctttttcccatactcattatctccctgctcagtctgtgagtgggatcacaggactggagcctgggttcctggaagcagaagagttgcgttcactgttctttcctctttccagggagctaaaaccccagggctcagaacaataccrtcatcgaggaaccagggacctcagtctaacccatagtctaagccttgttggctaattctaagtctgctcaacttagccagggagataccagaaatcagggtgaggctgaagtgactcagaccccctccctgccctgtaggtagggctcagagtcttaggttagggacaaattatcaactattgattttctcctcctgaatcctttacagctgtctagtgacagatgacaaaggtgacctttttatgccttatctcatttaatcttttcaataaccatgtgaagcaactatgattttcccattttacagatgaggaaatagagctccatagagtaaagggacttgtccaagggccctcagccaattcatggcagagccaaggctccatccccattaacctgatccccaatctagtctctaaaaaaaaaaggttttctccatatgacttctagcttaagttagatgtaggggacagaacacaggaactaagtcagtttccattttgatgtcccagctcccaatcctccccatcatgtcaggagaaaagtcaacaaaatgaaagcccaggcaggtgagtcactgtctgcccaataagcttcaccttttagactgaggtcattctaggcgtagtgtctggtgacgggccgcagatctctgatctttttgtcagtaatgtggatgaggttataaataggaattctagaaatcatgaaatacattggatgacagagtttgagtgcaaagaactttaacaggttggaatgtttgattaaatccaagcagagtaaatggtcctaacatattatattagaacaaatgaagctgcctaagtccaagtggtagagggatagctgaggagtactgtgtgttgagaagagaagggactttggatgttccagatgacccccagtttactaccgggtctggcaactaaggtcatcagcatgagcacagtgccagagagccgaggtgacctcaaattgcatgtctacacccagggcagggtagtccctctgctctttgctggagagaccccacctagggagacctgcccagctcctggtggcctgttttggacagatgtaggaattgaaaagagacaagcagcgaggatagggtagtggctgcaagccgtggtcacgtgtggttatttgaacctgaaggctcaggagcaaaacgagaactgtccgatcatcttctgatttagccgggagaagggagaggctgtgaggctgacatttcaggggatcttggatggaggctggcactcaggagccaatcagcttgggcttgagtccctgttctgctacttattattgaagttgggtatgttgtttacactctctgagccccagtttctcatctgtaaaatggggattgtaacayctgtctgataagattgttgagcaaaaaccctctgcatagtacctcatgtacagtgaaccctcagcagataccagccatctttttttggttgtttatatagggtctcaggtgtccaaagatggaatgggccaccatttactggcaagttttatgggtagattccacaaaattgtgttaagcattctatttatcagtggagagtagcaagaggtctttccacattgaaatcgaaggaggaccatgagaaaaatagaaaatatagagtgaatagatataaaaattttactccaaaactcataaaaccttgctgcttactacgtagggtccagaaataacccactttaaaaaggaaaataatggtccaaatttgagagcgtgctttcttttacaaaagaaactcggtatcccctctccagtatccccagggccttgcaaggagctggtacatggtgggtgattggtgttgatcgaatgaggaaaacaaataacttcagaaaaaataaattaataaaaatgatctatgaagatgccacaccagaccctggccacctccagtttgcaagaaacatagatgggccttatgttctgatttaagccaaatcaaagcccaggtgtgactgtgatctcactctgccacgcactggggtgagtttccaagtggctttcccagccatggtttctgcttctgaacagatggcatggctgtctacctttcaacccaaagccccctggcttgtctgccttccacatggtacggggacatcatcccaccttctcatcccattttcctcttcactcttgttagttttggcattttgagatgaggtttctcttagagtcttcacttgctgccccattccgaggagtttctcagaggctttgggctgggtatagtgtccatgtgttgggtccccagatggaatctgccctcaaggacttatggtcttgtctggttgggaaggagttcttctggaaggtccagaaggtcctaaggagactgttcaatgttttcacgctggatcaagactgataagtgacagagggaggggacgctcagagcagaggcccccaagagagccttccgatctctattggagtcagagcagagaccacatggaaacaaccatgtctctgccatccaaatgctgccctggaaactttacagcgtgttgctgtgttcttgagattggaactgccacccaatgggatcgcagactccagcaaatgcaaggcctatttatagccctgtggcaaatgttcattttggcatcagcacagtatgagcatggcatgttgcttttgtcttctcctctgtcctcagtggtctgttctaaattctcaagcactctaatgtgggttctggttttagctctgccagctgtgtgacctcaatcaggtcgctttacatctctggtccccagctgcctcatctctgaaatggaagcaatgatccgtaccctgtctgcttcatggggttgtcgagaggcttaaatgaggccaccaaagggaaagcttcatcctaactgttaactgccttactgatgcgagggtttattactattattgttgtaaaccttaatataaaaaggaaacgtctttcttgcatggggagtggaggaggcaaaaggaaacttaattaaatgatgaaattagatttttttttaaattgtgtcatggctacatgtatacagctagtaagaaccaaaggggttcatggggctgaaccgtgtgaactcaggatggcccactctcatgcaatagtacccgtttgtcagtcataggtcctaagaccacmtttctaccagatgcagagaaaatggaggtgtggtggctcatgcctgtgatcccaacactttgggaggccaaggctggaagatagcctaagcccaagagttagaccagcctgggcagcatggcaagacctcatctctacaaaaaatttaaaaattagctgggcgtggtrtcatctgcctgtattctcagctactcaggaggctgaggtgggaggattgctggagcccagaagttcgaggctgcagtgacccatggtcatgccacagcattccagcctgagtgacagagacagaccctgtctcaagaaaaaagaaaacaaaaatcaaggtgaccaagtaaattagaaatgcattcattcggtyggtccacaaccgttgattgagtagcccctgtataccaggcactgtagaaagccctggggctccaggagagaactggcatggccccaccctcccaaaactccccaactggcagaggagacagagaagcataccagtgcctagttaaaactcatgtgtccaacaacctcagcccttctgaccataggaatactgcaatggagtcctggaggcatttccacagttgcattagacaatggatgatctatccaagcccagtctacctcccttgcaggagagcctcactcaaagcctgcttgcttttgctctacaaatatgcttagcaatctaggcgccctactttccaagtctatagcagtttaaaagcagcaaattcagagtgaggcagaggaacttgatgatagtgaaaaatgacagtgtagaactgacagctagaaaggagacaaaaagccatgaaaagtggatccaaagtctaagtacaactgtctggggccatctggtgtttgggrcagtcttctctaagcccaagaacatagcccagaacagtgacttatgttcagaatgaaactatgggttaccaagaggagaagagaatgagaaggggcagctaaaatgtttctgaacatagtgtttgccatgcatgatacacaaattatctcatttaattcttaaaccagtacagtgaggcaggctttgctttcctctgtctgtccatgggaaaagtggggctccaggagttgtgtgcatgagttacctggcaggcatgtggcagaaaatctgctgtttgactgtattattkttttccccaaaaagtcagaagctaggttagaaaaagttttgtcttcatcaaaattgactaatgttctaaataaaatgtattatcattcaaatggaataagcttctgttttctggaaaactcacttacaagaaacagctacaacaggacagtagctggttgaagaactgtcagagctgatctgattttctgctctgaacttcctgctcagtgctgcctcttaattaattaccacatggtcttaattatcacatgtgtgaagaaaatctgcctttgtgtctgatcagaaggccttttcatatcctcactctgagtttttttgtttgtttgtttgttttttgagacagagtctcactctgtcactcaggctggagtacgggggtgtgatctcagctcactgcaacttctgcctcccaggttcaagcaattctcctgcctcagcctcctgagtagctgggattacaggcatgtgccaccatgcccagctaatttttgtattttttagtacagacaaggtttcaccatgttggccaggctggtcttgaactcctgacctcaagtgatccgcccacctcggcctcccaaagtgctataggcatgagccaacgcgcccagccactctgtatctactgattcttacttcctcataagtggagctgtctccttgccacaaccttataagattgagaaaacttccaaaaatccttttgttttgttttactaagagcggaacttcaagaatggactttgagtcttgtccctttgacttaccagctatatgtgttgagraaatttcatctataaaatttagataatagtgcatacctcatagggtagttgtgagaataaaataatatataaaaatagcaacacacataatgggacctcaatacacatgagatctctgtcagtaaaagatgagagttgtgaagtcttacaggctctgccattgattaaatgacctgggattactagggtgacccttttattcaaaagtctagtccccagccaggatctggcatttcttttcttttcttttcttttcttttttttttttaaagtttctgtggactaaatttcattcattagagagaagccccggagactgcctgcttttcttcagctgggattttgttaggtaattaaaatacgagagttttctgtattttccatgacagttttgtttggggcaacattgtaatgtagttgctgcaaaaatgactgtgatctgaggttgcattatgagaagtacagtgtctaaaatgagggaagcgaaggtcctgtatcatcgaaggagtctagtgaagagacagtgtgatcactgccttgaggtagttgaaggggtcttttgttaagcaatgtctatttaatcttcagataccttgccgaaccaatggatggagaccacagagaggggatctgagcttaagtcaaggaacaaatcttttaactcacatgtaccccaatgagctgctccacactgcagcctgggctttctcaggtattaagggtgttttagaggagtagcctctggacttgggatgaggagagtgcccctctgactgttagaattgatggtaacttttctctaacatataggagttgttgggagctctggcctcccttctgtggacagaccctcactttagcctcctggagcctaagtggaaggcagcaagaaccttcccagggtccagagcaatctcaggcttctctccctacaccctcctgtcctctcacattaaccctgctgtaggccaaggggtgcgacatgaatggttccccaacatctcctaatgtgggtgactccccaggattgaacggaaggattgtttaaggtttcagtttagaatgcgggcagtccatcaatgcacagaggaaatttccatccacccctgctctctgtagtcacttctgggtattttgtttacttacgggtacatgaccaccacttagaaactttattctgaacccaattttgatggaacctgacagtcctacaaactgggacttttctgcttgaatcaaagctatcaaaaaccatgattttcctgatataaaataatgacaataagaattagagtcaagtaggggtgcattagaaccttctgatgacttttctttaaatggaaggcaagcagtgtagctttgtacccttaaagtcagcagaactagatccaggcctgacttttctccctgactgtttgaccttggaaaagttactttccctctgattttcagtttcctcctctctagaatgaggatgataaaccacctcccagagtgaatgtgagtgacaatcaaataagatccatgtaagatataaaaatgtaagggaatttttttaggatctgaatttatacactctgtgttttggataaagattcagagcgacttctcggtttgccaagtggcatcttatataaactacacacttagattaaattgccttggccccttaaaaattattccccctgggttgtgttatgaggcctcagcttttagtaaagatctatacaaaaattagctttatgaaatctctttgttgtagaagttgtgttgatactaaactggctaatttgacagtatcctctccatatgggacatttttagggttagagactagaaaatactttgtttccccaaaratctggtatgttttctccttattgataatgagagttgtgtaaataaccttgttrcccttttctcttgggctgctgggaagttcatggtgaaatttgcagctaatgatgaatatggttagaacctttggtctgtctacattctgttccttctatcttcaggaaacataatttatatttttatgggcccttatgttttaatttttattcagtacttattattttattatacatgttatccataaactaccttggatcctttgataaatagcaaggaagaaaccaaacaagtaattaaacatttcctaaatcctctgggaagaggaagccttcctccccacctgtcttccagggcacagagccttgaactgtgcgactctcaatgccctcatagtcactccatcttttacaggcatacgaggagaacatgtatggtagtaaatatcagtggatcattccgggctggtacgagccttcttggtgggagcaggtgcacacggaagccaactcatcccgctgcctccggaagaatctgcttgctgccatggagggctacattggcgtggatttcgagcccctgagctccaagcagatcaagaccatctcaggaaaggtcagtgccttggtccccatttcaaccttctggcccacctcctttgatcatcttgtctgatgacattggccaraagagcacatttattgtcctgtgtcactttgrgcaaatcacttgacctctctgagcctcttgtacctgtaaaatgtggtatgtacaaccctccactgcttwcctctctaggcaactgtgagacccaaatgaggtaaggatattgtgaagcacataacacagtacacatgttatgtatacatatatgaataatagagtcctggcatcaacwtcagggccctttagactctgtaaaagttcatcccgtgctccttttacctaagatgtcattctcagttgtgttgatgctctcctggaggagaggaaagaygccttaagtagactttgggaaacacatgctgtagagctgccagactgcgtcaaaccccaattttaccactaccacctgtgtgaccttgaacctgagttctccaagcctctgcttctatatctgtgtggatatatatttttaggggccactattcagcatactgttgtgatcttaggatgtcccttctatagatatatcttctatatctctgcttctatatctgtgataacccccttctgggggttatcaggaggattgatggcaggtggtgcaagccactagcatggtgtctggcaccttgatgctgtcacgactgtgagcaggaccttggacagggtgtgtcagcctcagggcctctgcatgcttccatgaggagtgttactaattcctgccctgcttatctcatagggctattgcgaggaccaagtaatataggacatgtaaaagtatttccaaagcacaccattctctatcattgtaagtcttatcaaagatcaggtgatgatagccctggtaaaggtggtaacatccatttctcaattctgaacagcagccaaaattcagcacagcaatgcacataagtcttttctgagttcagaagttaaattattcactcaacccccagggttcttacagaccaaattttatatcaagaaaaagctttataataargaaaaatatatgtatataattttatgtattatttaatctcaattggaaccaactctacatgaatgatttatcgatttgtcaagaaatggcaaatcattaggacatattttgtaaacagctctttagctcgtactggcacctggttagaaaatgttgaaagaaatattttcataccaaaatcaatgcatatataacatttttttgagatgttgaataatgagcagaaataactcatttattcagtaagtgttatttttaaaggtgtcaaattttgcaatttattaagatccttgggtccagggataccctgtattttaatctaaaaatatcataaaaattgaggaaaacacaaaacctaagggaaaaaaatatccatgaaagcagatggtacagtaactaaatggagaggcttcaggaagaccaaagacttaaatggttgcacaggagatctgtgaggctgtcaggatgagagccatgagacactacaggaaggacctccctcggatatagttctaagggtgtggctttcagccagggtgggagccatgcagggctgtgtgcagggctgtgagcagtacacgagagtgcattgtaggaagatcattttttgtagtgtatttgggaggaaatgttttggcatttgtaacaacatcccccagatcactgacttcccttttctaaattttcttattcgggattggtgaagaggctgacctcttgcccatcactgtctcatgcatgggacaccttgggactgttcacctcacagttttggaaaacccactcataagcccamcccctggaggggacaggaccattgaggtggcttccaaaagtccaggagacccaatccctgtccgcatggtctttgaagcaagaggaagcatttcttacattaccccacagttacgagattgttaaagttacacaaggaaatttgaagcctcttcgcttcttggaatcagagggtcccagagctgctcttagacattatggagtccagcttcccatcagattctcagatcttccagtagcaaaggaattctctcctttaattctgccacccctaggtcccactggagctactcagatcctattgacccatctgtcccacatartccttcagtgaccacagagtcactgcttctccaaactaaacagcgctagtccttccaattgttagctcacaggtccagggctgggactaagcctgaaatttaaaagggtgccagatacatcggtaatcaagattaaacaaaatatgttaatgcaattaaaataatgccaaaaaaaaaaccccatgawgaacaaattgtcaaaattttaaataaagaccagattcacaggacagggattagggtgaggaaagtgaggtgagtcatgccagtgcaaggttggattctatctttatttaaattccgatgttttgttcatcatggatttcttgcattcatttttatttttaaaatattaaaatatttttatcttgattactgatagggtttagctctgcgtccccacccaaatcttgtcttgaattgtactcccataattcccatgtgttgtgggagggacccggtgggagataattgaatcatggggacagtttcccccacactgttcttgtggtagagaataagtttcacgagatctgattgtttgataaggggaaattcattttgcttggctctcatcctttctcttgtctgccaccatgtgagatgtgcctttcaccttctgccatgattgtgaggcttcctcagccacctggaactgtgagtccaataaacctctttcttttgtacattgcccagtctcaggtatgtctttatcagcagcatgaaaatggactaacacaattaccaagattttttgactctcccttaaattttgcacctgaaagtagtgctttattcacctagtacagccctgcacaggttgtatttatcaaacccctccccatgctcagcctgttcctttgttgcacttgcytttgttgaacattctctctagagggtgtggggcccagagttgaataaagtattcctatttatggtctgaccacaagccaacttctccgaacagccttcagaagtctatggtcaaacatagttctagagagtcaggaaatgtttcttgaatttgaatttgcgttctatatagctgcttggggccacggtcagcatggcactggctgctggattgatgcctgtattttgggatccatcgatgtccatgaaaacaagcaaacacttgtaaaaccacagcaagtgaatgggctcttgtcatcctcactattgtacaaatggaaaacctaagagccagagaggggaagggacatcccaagatcacgaaagtgggttgaatagtggcccctaaaaagatatatccacattgtaacccttggaacttgggagtgtgaccttgtttggaaaaggggggttttgcaggtgtaattaacttaaggctctcaggataagayttcctggattacccaggtaggccctaaaccaacgacaggtgtcctgtatgagagaaaggcagagggagagtttaggagagaggcatggagtggagggatctctcttagagcttccagaaggagccaaccctcatgatggggtttggctctgtgtctccacccaggctctcatgatgagatttcctggattacctatgtgtcaggggagggacctggtgggagatgattgaatcatgggggccatttcccctttgctgttcttgtgatagtgaatgagttctcacgagatctggttgtttgaatgtgtgtgacacttcccccttcactctctctctctttccttctgccttgtgaagaaggttcttactttcccttccactgtgattgtaagtttcctgaggcctcctcagcaatacagaactgtgagtcaattgaacctctttgctttataaattaccctgtctcaggtggttctttatagcagtgtgagaatggaccaatataactggcaatgcctgaatttcagccttctggcctycagaactgtgagagaataaactgctgttgttttaagccacccagtgtgtgggaacttgttggcagccccacaaatctaatacaatcatccagcaggtagaggcagatccaggacttgaagccaggactcctaatcccaactcagcgccccttcccctctgccatgctgctcctctagacctgtgacgtgcttagggacacatccaaatcagctcttttgtggcatctcagtgggcctctgttgttacgtgacacacaggagcacagagtgtggtactccagagatccggtgtggatcctgcgttcacaccacttaatctgcaacctcagcaagtcacattctctccctgggctaggtaacttctagggtgctttcacagctcagttctctaactttgtgtaactatggtgtggagttattacagcaagctctgtgacatggttatgatgttaagtcatgcaagtgcaaggttggattctgtatttaaatttttgatgttatgttcatcatgggtttcttgcattagtttttattttttaaacatgacactaaaatatgcttatcttaattactgagatattttggctcccctttaaattttgtacctgaaattagtgctttattcacttcatcctagcacagccctgcacaggttgtatttgtcaaacccctgtcctcttgtacttgctcttgtcagatctcccaggatacagctgactcccgatagacaaagtcacagaaaagggcagaacagtggcacctcctggatgcattctccaaggttccctcctttgtatgcctgtctctagcatccagctgtccccagctcactcattagcaccaggagttttctggtaggaggaatagcaaggtcacgggctccctccagaagcacgttcttcagtcctttcccattggactgtcctgcgttgggacttggaccttcaggctttctgagcccattcagagctcaattttctgggacctcatgaagacagcccctggactcctgctttgggcccaacattggctccttctctccactgaggctccccatcactgttctactcccgcaaagtgacttgacatcggtgatttcaagtgtcagcttccatttttcaagtcctgttcgktttgtttcctttgtgagcatttataattctggcttgatttctccagcgatggctcagcctctccaatagggacattcttctcctgttattgtgcccctgctgaggctcagtgctgggccaaggccccagatgagctgttcatagcaccctgagacctctggagtagccctagccctccatcaaaggcacaggtccatcctttggaagactttgtaatgttttctggcaagaaacttctgtgaccacccatgattatttattcaacccagcaaatctagtgatccttccacttagagccaatggcccatgaaaatctgcacccatctcattaccactgcgctgtgagcaccgtgacaaagaacttggagttttagggaagcactgagcttagcacggaggaaggaaaggtgctgcggaaaaatagaactccccagagagcccagcttcacagcgctgctctctcccctaccccccacaaagctcccattccttgctrctcccattccttgctactcccctaggcactcatgacactgggagaaggcactatgtcagaggggcatgggctcagaaggaaaaggctgactggcccatggaggggccactggctagacttgaatcatggccccaacacttcccaactgggtgactctggcaggtggctggtcatctataccaacatccatacctctcctcccctcttctaagctctgtaacacaacaaaccagagttcataacgcaactctggtttttaaccgggtatgttgccacctcactggaaaatgtattatacacttcccagccttccatgctagatatggccrggattgcaagtctggccaatgagatataagtagaagtgttatgtgggacttctagaaaggctctattaaagggggatatggcctttctttttcattctcttttgtgttgactggaatgtggatgtgatggctggatttctagtagccattttggaccattaggtacaaggtgaccttgacaaggaagcatcattctaggattgtggagcataaagataggaccctggrtcccttattaccctggggagctgtcatagctgtattactcagcctccccacagacatcttttatatgagaaagaaataacctatctcatttaagtcactgataatttgttttttctgttacaatgcagctgaacctaagagtaatacagtgatgttgtgcaagtcatttaacctttcccagtttgtctctcatctgtaaaatggggataataatatctctctcrcagatttgtaaggattagatgaggttatacagtagaaagtatcttaccaagtgcaaacacatagtaggtgctcaacaaatattaattctcttccttttcaggataggaaccttaggggtaggaggaaggagtagtgagatcgatgaagagtttataacccaggtcatgtgagatgaggagcaatggaaggattgggattaccttttatggtttcattaattatttttattgaaggagagcacccatgtaactaccacccaggtcaagaaaaaaactatttgtagcaattcagaaactgcctttatgtgttacagttaatayccactgccagatgtaaccattcttctgacttcctttgccattcagatgcctgcttttgaacttttgaactccacagctttttttagtatcttcagatttagggagtgtattagtcctttctcacactgttataaagagacacctgaaactgggtaatttataaagaaaagaggtttaattggctcacagttccacaggctgtacaggaagcatggctggggaggcctcaggaaacttagaatcatggcagaaggcaaagcggaagcaggcatgtctggagcagaaggaagcaggaggaagagagcaaagggggaggtgctacacccttttaaacaacccgatcttgtgagaacgcactcactagcatgagaacagcaaggggaaaacctgccccatgatccagtcacctcccagcaggccgctcctcctccaacactggggattgcaatttgacatgggatttgggcaggaacacaaatgcaaaccataccagggaagattcgtctttctggtagttattctagttcactcttaaataaacaccatcttctgtctttgccacagttttctcattctgcctttaccacaaaaccttgcatcagggcatgggtgaggcaaacgcagaagtgaaatgtgttaatttttctcttcttattcagtcatctgtaragttttgatgttctctgtcttccattatagatgtggtatcattttgtatagaatgtttgtagctacaaagctagctagtatagtttgcggagacttgggaaagttaatttatacacagcctccttcatcttcagctacctggaagtcctttaactggtgtgttttaatgaacagaaattctttaatagaacccactcaaaggctatgaagatattttcctatcttgtgttttagaaactctattgttttacctttcacatttagatctataattaacctgaaatacattttgtataggatgtgaggtaatgatcaagattccttttcttcttttctttttttacatggatatctaattgacccaacatcatttattgaaaagtccatcttttcccacactgtgccgccatattacttttgtcataaagcaaatgactttatatatttggttctgtttctaaactttttttttcacatcacgtattgattgtttatttaataagcattttatgctttaatttttctttttttttttttttttttttttttagtatttattgatcattcttgggtgtttctcagagagggggatgtggcagagtcatagggtaatagtggagagaaggtcagcagataaacacaagaacaaaggtctctggttttcctaggcagaggtccctgcggccttcggccctgtttgtgtccccgggtacttgagattagggagtggtgatgactcttaacgagcatgctgccttcaagcatctgtttaacaaagcacatcttgcaccgcccttaatccatttaaccctgagttgacacagcacatgtttcagagagcacggggttgggggtaaggttatagattaacagcatcccaaggcagaagagtttttcttagtacagaacaaaatggagtctcctatgtctacttctttctacacagacacagtaacaatctgatctctctttcttttccccacatttcccccttttcttttcgacaaaactgccatcgtcatcatggcccattctcgatggtcgctgtctcttcggagctgttgggtacacttcccagacggggcggcttggcagaggcactcctcacttcccagacrgggcggccgggcagaggckccccccacctcccagacggggcggctgggcagaggcactcctcacttcccagatgggggcggccaggcagaggcgctcctcarttcccatttggggcagccggccagaggcgctcctcacttcctcccagacagggcagcagggcagaggcgctcctcacttcccagagggggcggccaggcagaggcgctcctcacttcccattcggggcagctgggctgaggtacycctcacttcctcccagacggggcggccgggaagaggcgctcctcacttcccagacggggcggccaggcagaggcgctcctcacatcccagatgatgggtggccaggtagagatgctcctcaattcctagacgggatggcggccgggcagaggcgctcctcacctcccagacggggcggccgggcagaggggctcctcacatcccagacgatgggctgccaggcagagacgctgctcacttcctagacggggtggcgggcgggcagaggctgtaatcttagcactttgggaggccaaggcaggtggctgggaggtggaggttgtagcgagccaagatcacgccactgcactccagcttgggcaacattgagcrttgagtgagcgagactccatctgcaatcccagcaccttgggaggccgaggcgggcagatcacccgaggccaggagctggacaccagcccggtcaacacagcgaaaccccgtctccaccaaaaatacaaaaaccagtcaggagtggcggcgagtgcctggaatcccaggcactaggcaggccgaggcaggagaatcaccggagcccgaggcagggaggttgcagcgagccgagatcacggcagtacagcccaggctccgcaagagagggagactgtagaaagagggagacggagagcgagagcgagacggagagcgagagcgagagcgagacggagagcgagagggcgagggagagggagagctctgtttctaaactttatctttttcttttccattgtttttcaccaaaacatcttaatttctgtagctttataataagtcttgataactactcatataggttctccatcttagttcktcaaaactrtcttggctattcttgtctctttgcatttctatatacatttttaaaacagattgccagtttatacacacatacatacatactttctctggtttttattgggattttactgaatctgtagatcaatttagggaaaactgacatcttaatattaaagtcttccaatccatgaattgtgtatatccctgcatttagttaggtcttctttaatttctctcagaaatgttttatagttttctgtgtagaattattgcacatattggctgggcgcagtgactcacacttgtaatcccagcacttggggaggctgacgcaggtgaatcacttgaggtcaggagttcaagaccagcctggccaacatagtgaaaccccatctctattaaaaatacaaaaattagccgggcatgatggcacatgcctrtagtctcagctacttgggaggctgaggcaggaggatcgcttgaacccaggaggcggaggttatagtgagccaagattacatcactgcattccagcctgagcaacaaagtgagactccatctcaattaaaaagaagaaaaaaggattattgtacttattttgtttgatttaattctgggcatttgatatattttggtgaacatatgtgcacattactattgggtgcatacttggggtggaattctgagtcagagtagccatatgttcagctttagtagactctgtgacaaacagctttctaaagtggttataccaatttacacatccgcaagcagtgattgagagttccagttggttcacatgctcaacaacttttggtgtgtcagctttttaattttagccaaactagtgggtgtgtagtggttggtgtcttgttttagtttaaatttgcatttccctgatgactaatgaagttggacatgttttcatatcttcattggccattttgatacccttttttgtgaattgcccattcaagtcttttgcccatttttcctgttggatactctgcctgtttcttactgatttgtagaattcctttttagattctggatatgaattatttgacagttatatgtattatttatatcttctcctattctgtggcttatcttttcactctcgatgtattttgatgaataratattcctaatcttaatgtaatccaatgtattagtcttctttgtgattagtatatttatgccttgtttaagcattttcaggatggggagaaaaaagtcagaaaataagaaatgaacatatgagacacatgggatatgttgaaaaagtataatatatgtataactgtgtcctggaaagggaggaaagagagactaggcagaagcagtatttggttttgttattttagttttttctgaaaatcaccctgtcttgatgatttggtttggatgttcgtcccctccaaatctcatgtcaaaatgtaattcccaatgttggaggtagggcctggtragaagtgatgggatcatgggagtggatcccccctgaatggtttagcaccatccctttggtagcaagtgagttctcacgctgagttcatgtgagatctggctgtttaaggtgtgtgacaccttcccccttgctctcttgctccattcttgccatgtgccacacctactgtcctttggcttctgccatgattgaaagcttcctgaggcccttaccagaagcagatgccagcaccacgattcttgattctgcacctggagaatcatgagccaattaagcctcctttctttataaattatctagtctcaggtatttctttatagcaatgcaagaacggcctaatacacccacccatgctcgtgaagatattttcctatcttgtcatttagaagttttgttatatctttcacatttagacatagaatttacttgaaattaattttatgtatggtctgaaataatatatttaattttatgaataatcaattgattcaggactatttattgaaaaggccataatcccccatcccaccactcaggctacagtgtcacctttgtcataaattaaacaactgcatatagtgtggatatatacacaagcttctgaacttccatttatcttcctttggtctacttatctatcttttaatcaatatcaccctgttttaattactgaagtatgatttgatactttgtagtataaatccttaatctttgttcttctttaagattttcttggcactgatgtcatttttcatttagatctactaacacatttacacttcctattacttttttccttcccacatttctatttttctgcttattgttactattatttttctgccagaagaacttctccttggtctttcttttactgtgactcttctggaagcaaatcttccaagtgtctggctgtctgaaatttattttacctttaatattgagagatgtattgactagatagaggattttagatggcctataattttcttttggcactgaagakgtcattccattgtcttctggcttccattgtttctattgagtctgctgtctgacttattgctcttttgaagtaatgcatctttttttcctctagttattttaagattttgtttttgatttggtctttggcagttttactacactgtgctgaagtgaactttcctttgtgttcatcttgcctggagttcatagagctccataggatttcatgaatctgtgtattgatgtgtgttggagaaatagaatagtatcctttgaaatattgcttctgtctagtctctcttttctcaccttctaggacacaattatacatatattatactttttcaacatattccatgtatctcttatgttcatttcttattttccaaactttttttctccctatgtttcagtctgaatacaaacctgtatttggttcactaatctactttctgctgtgtctaatatgttgtttcacctatctattgaattctttatttcaattgttgtattttttatttttagaatttttatattttttcttttatagtattcagttctctgatgacattctgcatcttttaatcaattttcttgaacatacaaaccttgctattttattttattttattttagagatagagtcttgctctgtcaccgaggccagagtgcagcggtgtgatcttggctcactgcacctcccaggttcaagcaattctcttgcctcagccttccaagtagctggaattacaggtgcccgccaccatgcctggctaatttttttcccatgttggccaggctggtcttgaactcctgacctcaggtgatctgcccacctcagccttcccaagtgctgggaatacaggcgtgagccaccattcccgccaaccttgctattttaaagttcatgtctaataatgtcaagatttggatcacctatgaatttgtttccattccatatacttttctcttctttttcttccttgcttttcttttaaaacaattatctggacctatttcctggtgtacctagtacattttaattaaatgtgttgtgtatgaaaaattgtagaggctacagatagtgttttctttctccagggaaaatgtattactcttcaagcaagtagttagagtagtggcaaattgccttaatccagtgaagaactgagatgattccaggttcggtttcagtttttgtaaggcccaatctattttggtttgccctgattcctagtgtttgacccttcaatgttctcaactgaaatcctgggatatttactgaccctggactccaatttttattttcccaatactattaaactctaaatagttctgtttgttttcttggctcttttgcttggcttctcagcctcttgctttatgcagcttaattatcaaatattttaagtaaaaatgccagtcttaataccaggctcacttttttatggttccctttactctggcaccttggccatgcaagtcttgctaccttggtagtccagaactacagtttttggcttcctatccctgagggactgctgaaaactctgatccaatgctttctgtttctgtgactagccttcttacttacaaatcagaaaatgcctcaaaaggaaaacagcaaagaatttggggcccatctcaaagcatttatcttctctccagaatgatggattctcagtcctagctgtcctgcttgttttctgatgtctttgaatagctattttaatattttattctgcttttctaaatgttcttgatgggagctttggtctgatataagcgatttcatcatagagtggaagtctgaactgagattattttgcttaaaagaaggagaatgcattagaaaaggggaggcatctccctgtctttggctctttgaggggctgttgtgtataaagggagcagatgtgtgtattgtggctccgcaggaacacgtagcatgcgaatacaagtttcagggagagaggtgcaaactctgcatctggaagaacagtctcctcaacatcagccattccctaagtggaaagttctgcctgagaggcatagtgagcttcccaatactggaggagtataagaagaaactcagcaaacacctggaagttgctactgaaaagatccaataattatccaataatcagatygcaggagggacttcatcagtggttaccaatttttgtatgcttgaaatctgagaaggtttttaaaaatacagattcctaagttaactcactcactgatatactgaaccaaaatgtatccctggcatctgttcttttggttgtttgtattttgtttttgagatggagtctcactctgtcacccaggctggagtgcaatgatgcaatctcggctcactgcaacctctgcctcctgggttcaaatgattcttgtgtctcagcctcctgagtagctgggattacagacacctgccaccacgcgcagctaactttttgtatttttagtagagatggggttttgccaggttggccaggctggtcttgaactcctgacttcaggtgatccacctgcctcggcctcccaaagtgctgagattataggcgtgggacaccgtgcccagccgtggcatctgcatttttaacaagcttcccaagtgatttacaaacggcagcacrggaaccagcaaactaaatattctctcgtgtacttccaaatgagactctgtgattcaaacctcccacagggatgccagcgagaaagtctgccagtttcacctctgtggggatcagttgcagatgtggaagaggatgtatccttctcctgccctctcttctgtccatgaggctcccctctcccaggaagaaggactcagctcatttctgttgggatgacagactcataaggtttagtcacattgtaggttagcaagcttgtgtgggctagccttgggacctaaccactatttataacatagtgtctgtgggaaaatatgttccaagttccaacaaatgcctttaaaaaatattctggaggccaacctatcagtaattgggactatctgcataagttattttctcagaaacttttagcatctcacgataaacttgacctcggaggatggtaattaatcagcattcggtgtcagctttacgatggaagaaattcttctgccttgaawaattggaggcctgctttaagaactttttctccaacaattgtgagtgcgtttcttcctgctgtcattgtcttgcccaagggagttggtgctggcatcgcctgggaacaatgatgaatggcctgggatatcatgtggcagcaacgacttctttaacctggtgcttscaaagacagcaagaactgaggtcacctttcagggcttagctacacctgtgtcygattccaaggactctacccacagaaatctggtaaagagccgtgtttccagtgttcttggccctcctcctgatccttgtacccgggaaggacagttttttgagatagatgagtttacaagtggcatatgtaaagtttatatagggacttttgttgacctcaaggccaaatccaatagacaatatgatcttgatccccttagtgtcccacaaaacaaaacaaaactatatcaaggaagtttaaaattacactcagttaccacccagtgagaccacactgggaatgttcacctcaagtctggacctcccacttttaaaggatcatagaaaccttgaaggctgctccagtgtcgtgttctggtcagggaggtgttgtagaaatgtcrtctgaatgtagtcattaggtcgaacaagggaattcaaaaatggacaccaccaaccctcgaatgccattgcgtgcattggagaaagctcataggagcaaaatccaaaagagaagtcaaaggggcctcatttctgtgatgcttaacgcaattaattaaagaaacacgcatccaagtactgtttaaatccttttaaaatggtcagtagttaacaaccagaaatagacacaaatcacattttaaaaaatcaaagaaaatacagccaagtagtaaaagatggaaaaataacaaggagacactaaaacaaaacattaaatgatgtgacatcaccatagcaagatggtataggaaattcacctaacataattaggaaattcacctaaaaaattaagattgctggttaatatttaaaataagctcattctaatcattaaagaaatgcaaattaagattaaaagaatacttttttcttaaaagatatatatgtttttcttaacaaactgacaattgagttaaaaatgaaaatacctattgtcaaggatgcagggaaatgactactttcatacacagtaggattacaactttttgtatttgggaagaacgattttgctctacaatgtgtgaataggtgtgctcctgtgttttacagacagagaaactgaggcctaaaaagggcctaagcaggtattgtttgagattctggtggtacctcagtgatcaagacagatcacatctccgacctcatggagcttaattctaggtgggtrggaagggaggagtgaaaccacagaccataagcaagtaaacacataaggaggaaaattgcagggagtgacaagtgcaataaagaagataaaaacccctggcctcaggctgggggcttttacaacgggtgggtcaaggaagccatccctgagaagtgacaggtgctgacatttgaatgctgagaattatcatgccaagagctgggcaaggagctttctggcagagaaacagcttgtgcaaagccctgaggtgcaagccaacttgatgtgatcaagggacccaaaaggtttaaagagacagagcttcatagtggactgtttcctccttctctaggaggagtgaaagtggcggggatgactatgagcttcaagagccagcgggcatggagtgtgggcgggtggaggaatgtgagtaacaggacgaactcagggagctgagctggactagaaatgctggtctctttgaggaacctgggatttggggggagtttctgcccactgtgtatcttgagtgatgagcagagtggtggtagctagagaggatgcatttccaaggaaagctgcaaacagatcaaacctgagccttccaggaggaccctgaaacaggaggaggcagactcccggccaggattcattcacatttggtcatgcagaattcattgcctgcaaggttcacagccgggggcacttggcactcatccccaggcatctgtgtgggtgaccccacaagagacttggcttcttggccccggtgggctccacccacggaagacacagtctttgatggcccagctccaccaccttccttaaaaacactagacatggcccaaacaacttgtggtggttttcaaaaagcaattatgactttagaaatcaaagaggaaagaagtagccaagatgaaatgggaaggtagtctggtgccgcgccccccctccctccaccacacacacacaggctgtgtaaccttggacatgtctctgcacctctctgtgcctcaggctatagactgactgcatgcccgtgactgtccctaaggggcccttctcagtataaactgacaaagagtcaattgtcctgtgtgtgatttttccccaaggagggtttttccaaagaccaagccgtgggccctgatgacatttctggcagaggagttcagaagtgatttgaaaaaagacccatgaaggagctgagggtaatgggtcccccagggtggcattcatctggaagtgcaagttccaaggtctggagtaaaaaggcagtttcgttactttgtggccacaatcaaaatgttaatatcaccaatgaaattcctttatgaaattcagctcaatgggagaaaaaaaaatctttttttcaatgctggcctattcggactgttatattatggaaggtagatggaatagcaggagggatggatgctgcctgacacctgagcaactgggccttgccctgggtcacatgctctaagaggtcctcattcaggcccctcggggcccagaatctgcaagccacggacacagcccactcagacctgcaccccttccagcttccagactgtgccctgaattctcaacccataagctggagccacttccagggtctagggagcctcttgccccagttcttgagggtagactgtgcctttgagggtacagggagctactgatgctagaaggggaaggaggtatggactgagcctggctgggctgcaggatggagaggggtgggaagggaaggggaggggtgggctgagcagcacactgtcagctccctctgtgctgctgaaactcagagaagtcccagaattctgaattccagcttggccttccagatccctaggaaggtgtatttattacgatgaggagatagagaatatttttgaacagtttgttcatatgctataactttaacatttagacatacgggatatgggcctctacctcaccccaggccctgcaagtttagaggcaaaggcctggttagggtgtattatcccctctctctagtcttgccaaaagacagtttaaatctcagtcttgtcactcactagctttgtggaactaagcaarttgacccccctgaaaatggggggtctgtaaaatggggacaataacagtacccaccttatgaggttgttgtgagggttaaatgagataatgcacgyagaatctagcactgtacctggcaccctgtgggcattgaagaatagcagctcttctcggcatcaggcacctgatgtccctgccgagtataacttgggattcccccaatcccctgtttttccagactccacagcagtatgagagagagtacaacaacaagcggtcaggcgtggggcccagcaagttccacgggtacgcctacgatggcatctgggtcatcgccaagacactgcagagggccatggagacactgcatgccagcagccggcaccagcggatccaggacttcaactacacggaccacacgctgggcaggatcatcctcaatgccatgaacgagaccaacttcttcggggtcacggtcagtcccatgcctctgggctgttttccttagtgttccttgtaaacatgcaaagcaaaagaggggctrttacaggctttctgttrtgtgatctgttatctctgatcattgaaataactaattgcaggccctaggattgcagggctgttcagacaaggggcaggggcagtgtgtgctctcagacacattgggaaaatgcttctctgtgactcatggataagaaagggcatagagccaggtacttgctgaaggtaggctttcactctgctacaaaaatggytgaaaagcgttctatccttttggctatttacattttasagcagtggctctgtgctccctggcacagtacctggcttcaagctgctaaactacctcctgttatgaagatgtgaaaagtttttttgtcattgaatataaacaattagcacacacagatagcctcttcaatctccatgtgaatttaggatgaactatgtatgacatggtgctgtaaattcttcctcttatggactaattttggtgaccatctttctgtctctgcagtctcttaagcagattgactatgatgcatgccacattcaagtttaattgtgtaataaaacagttttctttctgttctgaaaaaaagaaaagaaaaagaaagaaagggcatagaggccgggcatggtggctcacgcctgtaatcccaacactttgggaggctgaggcgggtggatcacctgaggttaggagttcgagagcagcctgaccaacatggtgaaaccctgtctctactaaaaatacaaaattagctgggcgtggtggcacatgcccgtaatcccagctactcgggaggctgaggcaggagaatcgcttgaacccgggaagcagaggttgcagtgagctgagatcgcgtcattgcactccagcctgggccacaagagcaaaacyccatctcaaaagaaaaaaaaagggcatagaaagttgactgcgcacacagtgcaggcacagtttaccagatggtgggctggggtgggccaggagaagctctggacccaaaatcaggttcaaatcctgggccttcatttacaagttaccttctttgaactacagttttcattcacacaatggaaatcatacttaccttgtaagctagttttaaagattacacattacataatacaaccttttaatatttattaagcaagctacttgctctgagcctcaagtttctcatccgggaaatggggataataatataaatcttgcatggaagttgggaaaataagcaatgataatatggctaatacttcttgattgcgtattatgtgctagacattgtgctaaatacataatgtagttagactcaataatgtatgcctagtgctaggcacatagcaggcactcaataaattctattgttactgttaataatgattacaccatatccttatgccatccataggaagtaggtgctcttattattcccatgaacagtgaggaacctggaactcagagcatttaagtactatagctaatcagggtcaagtgggatttgaactttggtctagctcttaattgctgcagaaggtagtgaccttctggtaatggaccaaagtggtagttatttgtcactgtctctgctccagaaaatatggaaaattcatctgaagaatacgttgagtgggctaaagtgctgtcctgtgttctaatttacagattcagaatagagtcagtctgtcttgaggaataaagggtagataagctgagctggctggggcatttcttgaatatgcatattcatgcatgcctgtgctgaggcttatattgttggtctggtgggctggaacctgtgcaggtgccgaaggtgtggataatggtgtggatgccaaggtaagatgggctccctgtcctagagcctgtggctcacatgcacgggcaagacctagacaaaaacaatgagaggttaaaagtgcttggcactgtgggagaaactatttgagcccaagcccgagcccagagggatttctgtgacctttagtgaaaaagtcagggtaggttttttggaaggggtggcatttgacccatgccttgaactgtgggcaggagttagacatgaagacaggggctggccagagggagcatggtgagcaaggaagaaatgcaagagggagggaaggacagttagttgggctggaacactggcaagctggataaggaggctgggaagggaagttggggtccatttctggagggacatgctaaggagactggcctttatcttccagaccaaccattcccaaagtgtggtctgcatcatctgggagcttgttagagatgcacattcccaggccccacatgggcccattaaatcagaacctctcggggtggggcccagccatctgtgttttaacaaaccctgcaggtggttctaatgcacaccagggtttgagaccactgctggggggcagtggggaggcacttgggtggcactgaggtttgctcaaatgaagtcgatttccaaaatccccaagcagagccattctggactaaaggctctgaaaaattcactcccacaatgtattggcgaagtccatttctgtagcacagcctagattcaggctggaaactttaacagctttcctcagaccagtagcttaaagaattatttttattctcagaactccttgttataaaatctcacatggagcctggtatataaaacagattaaagaagagcttctcagttgaacagagaaggagccctgaactctgcctgttcagccccctcttcctgcagccctctccccacccctgcagcccctgagatccctccctcagaaatgctggacagaacacccattagaatacctccaaagtcctttctcctcatcctacaagttcatggactgagactcagaaaggggtgggattcacccagggtcccacgggtagcattttggcagggctgtttcaaaatgaattcaaagtatccaaagttgaaatggatgaatagagagctacagaatctagaaagcattttgccacccttcayaatcctagaactctgcattttgcctaggtgcctgatagatcttagttggagatcatttataaccacttctaaatgctccctttcatctaagccaaataatacataatccttacttgatgagcaattagatagactgcctgaaatgttctccacggcttgaggatgagtttctttttaatgggaaattccttggcacctatttttgtctgctccagcttgtgactcagaactcagtgaacatcagaactgaaagttgtcttaaatatcctcaaattcaatgcttttgtggtgtagatgagtgtctgaggtccagaaaaggaaaatgactccttcagagccacgcagcaagatggtttggcagagctggaatggtagctggacaggccctgcctccacccactcaacaccatctcccttttctttgcataagtgcccctttagtggagacagaccgcaacagtgaaacagtcctgcactccatgttaccttcctcctatctcctttgtcacatattaataggtgcttgtcactgggttgtagacaggtttcgttaaaattgtcttctggtcacagcaaaaaggacatcttctgacaaaataaaaagtgtctctgtggtccaaggagactacagaaggccaagttcagctataaataaagagttagaaaggaaaacaacatgggaggtggaaataaatggaagcattttccatttgctgaaggattttcattatacagcacacacagtatccatttttccactctcaggcagacatcttagtctgggtgccccctcatttagcatgtttactatatgggaaatcgtttaaacacattaaattaattatatccatgactcaatttcaattgattcaatatgcacactctctgccgggagctgggccagtggtcccggcttggcatatggatgaagaaatgtcttccatgcatcctaggttgggaatccaccttaactcaaggcaagttctgttttatcttcttagaagctctgctcccagtgactctcctcagggaacactctgaagtgggattccatgtccctgtggccctctgatgacttgggggtgccgtacatctctctgatgttcagccctgggattggccctccatggtttagaagtctcaggatgcttcccctcctccatccccctcttctgtcaattatgcaaccaggaaactcaggctagaattggctatttaaatctcaaaagcccagagcattctgagaatccccttttctgaaaatgacagggcttggaacccagctcagcagagctcatcattagagcaatgattcttaaccttctaaaggcatgagaatcttccagggcgcttcatttaaaatgcaggttccctggccccaccccataacttctgattctgtggtcttacagtaaagctcaggaattcacatattaaacagcagtctgagagattcttaaayagcaacctgagaattgcttggggccacacacacacgtttgtggtttaaacctgtcagcaatggatttgctcctacattcattcactcctctagcaagccccgcactgggtgtatggagtatagagaggaataacatacggtccctggccccaagagcccctcattcaatagcagtgggaatggacaagtagaggaacaattgctaggcagtatccaaggtctgcccaaggcctctggaggaaagacggtttcgcttaggggagtaaagaccaaggagccatcctaacttgctggatcaataattgcaaggtagccaccctgtggggaaccctcctgtgcatgtggtgggagcaaggatgcaataccaggcccctcttcccaacgctcaacacgtcagtgtgctgtggctgaacagactcctttcatttggctttcctaatcaagatgcactaaattcatcgtcaggagaccataacctttcagcacatgcttggaaacactggctaagtcttcaggtgaaaatcaaagccttaaagttcttcaggtgatctttttttttttttttaaactctttccagtttccagtctcttaaaacaagggtgacctcccagatctcaaggtcgacaaatcctttgggtatgtcaggctaagatgatggctgttaccagcagtataccctgtttggtaaatgtatcttctgatttgtcttttaaaaggacagcacattgagattgtggtgcctatgacaggctaaatttacagaatcagctgggtgcagtggcttctgcctgtaatcctagtactttgggaggctgaggtgggtggatcgcttgagcctaggagtttgtgaccagcctgggcaacatgatgagaccttgtctctacaaaaaaatacaaaatttagccgggcatggtggcaggtgcctgtagtctcagctacttggaaggctgaggtgggaggatcacctgagcccaggaggttgcggctgattacgcctctgtacttcagcctgagcaatagagtgagactccgtctcaaaaaagaaataaaataaattaatagactctcattttaccttatgagaattgaacccatgcttttccaggagttccttagggcatgtacactgggtttggatgggggcttttaggtgtcaagagcatttgwccatagggaaattgaaagaggctcctggggaatgtctcggattatgagaagagggctccattcttgctaaagtttgctgtgactgtccctcattctcggtgggtgtactctatgtgggaacgatcacagttggaaagagagtgacccattaagttcctccaaataatagagccatccttcatcctctgcccagtgtctctcaaccagcagcgggtctggacatcctagtgtaacctctgtcaggacaggctggcacccttaggttcaggcatttcacctccgatggctgttatcttctaattggtctcaccaaggtgatgaagaacagcagatggcgatttgcagagtgtattgatccatttgcttttgttgctggtgaagagggatccagccttagccagtataccccttaaagtttctgcaagatttttaaaaaattatttctactaagactcaaaaaatgctccccccaccccctagacaagtcaccaccccaccacccaccctaccaactttttacctaaaaggaggacatcatagagttaaactcagtttggctggaattccaagtactctaagtaaggtcaaactaggtagccagagaaaaccaacaggttcctcgttccaggggaatttgcaatgttggctcaaacccacctttatttcatccccactgttgcctcgccctactgtgatcctggagtttgtgcacttggtttttttaagtcaaaatataattttacacacacacacacacacacacacacacmtacatactagttacatatcatcttgttagagttgtcccatctctcctgcctgtttgatcttttggggtcctggttttactttccaatgtagagactaaacttcaggcctcccaccagccagacattggtgtcttatatttgatatcatcatttactcatagaagtcttttttaggggccgggcgcggtggctcacgcctgtaatcccagcactttgggaggccgaggcgggtggatcacgaggtcaggagatcgagaccatcccggctaaaaaacggtgaaaccccrtctctactaaaaatacaaaaaattagccgggcgtagtggcgggcgcctgtagtcccagctacttgggaggctgaggcaggagaatggcgtgaacccgggaggcggagcttgcagtgagccgagattgcgccactgcactccagcctgggcgacagagcgagactccgtctcaaaaaaaaaaaaaaaagaagtcttttttaggttgaatctgggaaagaaaaagacaagaaacagggcaccgggaactccatccagaaataaggaaaactctacccagtcaagatttgacaccacttggggctggtcattcttccagttgtgactctatcccccagattatcctgattgtgcctgtttcttgactttgtgctcaaggctgtcactggagaacttgttagaagctctgaaatagtccaaatgtggtataacaactgggagccctagaacatggggcttgttccagtgaccccatgctagcgtccaatgccaccccacggtttcctattctgaggtccctttttcatgttcctttcttgtctgctgcccgggagcaacagaaaacccatccagaactttctctgtacctcatgtgtccccagcacatcccagacccaggtagttccagtgaaattgcatcacacataaacttaacataggagctgatttgagactctaatctctctmcctccattctctggctaaccagcccaccctcaaactcagatgaaatgtaccattgcccaggacatggcagtgatcaactataacaagaattacaaatttgaaaggtcaagtaaaaacaggtcacagtgtatgtatctcttagagctgtgtgaccttggagaagttacttacatctctgtgcctcagtttcctcatttgtagagtggcggtaaatatttcttctttcaaagtgtggctgtgggaaataataatgtttagtacctaagaactacatcatcattattgctattattattactactgctattaaaatggctactttacaaagagcagagtttgtgtgggtctaatcaagacccagcaaacaatcattgcatacctatgagataccattctgtttcatatatataatctcatttcaccctctcaacaataaacaaatctattaacttgtaagaaggctggagtggtttactatccacacagaaccaagtaaactctgcctctaagcaagaacacttgagttctctcctgtggccattcactctagggatttgaaagttaccttaatgtggaaggcatctgctctcagctctccctcctcttcctcccttttgactagctcagtgctccagcagccctaagcattaccactcagcattacacacaaaagctaattgcagcagatgctgatggtgtcccacccagatctcctgagctcagtttcagagggctgcttaggtttgcttatcccccagctgctgcaggtgcccctgctaatggctcacacctgctgccttccctacagtccctacaggattgggcaattggtgcctcctgcctggaggtgcctgggaattacacccacaccatcagcctgcagcaatgaccgatgcattggtacaacacccagtgcaatttaccctccagggcttccaaccagaacaggctgaggctcaccttcatcttaaaccacatctgagcatggcctcttcctttttcttctctcccttacaggtttcttcygagaacacgtcgttaacaaattactgacatgtgattccctgtcctaggctttgtttctggaggaccccatctaagacacccatgtgtatttatgggaaatttaagcattttcaagagaaaatttttactataaccttatagttaccatatgtgtaactttagaaccaatggtcctccttacctacccccacacccgattggagggttctggactcttctccctcgtccctggtgcattttgcatgcacccctgccagttgcagtagcctgtaggagagccatattcgtctcctccagcgaattactatctcccagatttgcagggaccrcagcccttcctttctctgatcccctcgtacttcacctggccctttatgcctggtagaagctcaataatycctgataacctctagtgaatgttgttggattaaaktcacaaatgattgagaaattcaatcacacttttctactctgttgccttccaggcatctataaactaaaaagactttttcaacccgataaataatcagaactgacaacagaagtattaacaggacttagatttcttgaatctgctaatagtgattaccaaattcttgctgtgatacctggtagcggtaattcacacaaggtcacgtgcgtgtgtgtgtgtgtgtgtgtgcgcgcgcgcgcatgtgcatatgcatgtgcacgtgcacgcatgcgttggaggaatcccttcctgaggcagcataaaaactcatcccttactcccctctcaatctctcgtttctcccataagcaactctctggggctcaaatcccagggcttgagcagcagaagcaattgctgatgggccctctgtgacttcagattgtcagaaacattttcgagaggtaattgctagtaataaacaacaactataataataataatccttgctgtgtgactgccctgtttacagagtgcatttatagtctctcccatcttccttccttaatgcaattacatttattcactcatgctaataatagttatcaattaacgagctcctactgtatcccaggaagcattctaagcacttttcccttattattgaatatggtggggacgtacaattcccagttcctggtacactcctccagtgagctgcatctggcttgctcacctatgtcaggtctctcccctcctctctccttcccagtgagacctaacctgacaccctactttaaattgcaactccctccccatccacccagcccccctctactcatccttctccacaacatctagccccatctgacatactacatattttacttatttattgtctgttttattttctgctttatctctaaggcttagaactgggtgcctgggacatagtaggtgcctgataaatatttgtttaatgaacagatgatttaaataattaatgacatgtcatagattaaagaaacaggctcagcaaagttcaatgatttactcaggatccttcaggtagtaagtgagagtttatgcaaggctaccaagtctgactgactcaaagtccatattcttaagcatttaggtatccaattaattcaaccagcattcattgcacctccagtaagccagaccagggccaggtaggagtagtaagatgtaaggttttgcccccaaggggctcacaatgggaacaaccaggtgagatgcatcagagagagagcaggtactaccatccccatattaatagtgaaggatgtaacggttcccctctacactggattatttgtgtgtctatctgcctcctcctgctggactctgagccccttgacagtggggcctgtaattctctctgtacccctggtgtctacaagacccagcwcttagtccatgaaatatatttgctgattgaatgaattacaaaattatagctcagaaaggcaaagtggctatgttggggtcccacagtgcataactggtgaacctggttcagaattacattctaggtcttctgatctaaatgcaagtgtctccaaatcttgtgctgttaggcgttgcttggctgcccttccccctttaatttaaatacaattacaaatgactgcagacaatgtacagcacaggaaagaaacctactccttctgctgtcagataaatttgaaagatcaaaataatgtggtttagcaatttgtttgaattgatgcctaaccttccaaagcttgcaagtttgacttcatcaagtcagggaaaaaatagctatttccttaagaaaagcagtgtgggggagtgtatcagcttatgagagcttcaacagaaggtgcaggctctgtctttatccctgggagaaacaaagaggaggctccttggaaggagccagggacatggtggtcacagcaaattaccataatgacagatgtcatgataataggaatgatgaacagttttgaatgcctactatatgctgagcactatgccaagctcctagatgtattatttcacttaatcctcacattcacctgttatggattgaattgtgcccccctaaaaaatccatctgctgaactgcaacccacagtagctcagaatgtgaccttatttggaaatagggttgttacagatgtgattagttaagatgaggtcgtactgaagtaaggtaatccaatataaccagtgtttctataaaaaggggagatttraagacagccaggcacacagggagaatgccatgtgatgatgaagcagagatacggatgaggtttctatatcatcagcagtgtcagtgattgccagccaaccaccagaaggtgactgatcctccttcacagccctcagaaggaagtggccttgccaacaacttgatctcagacttctagcctccacaactgagataacaaattcccattgtttaagccacccagtgtgtggtactttgtgatgatggcccaagcaaactgacacatccccaaaaagtggagactgctatttattgtcactgttttgcagctaagaggttaaggaggtagaggattaagtaatttaaccctctcattcaacctaagaggttaaaaaatttacccaaggtgacagagctagtgagtagagaagctgggatttgaacataagccatctaactttcgaccctcacttttaaccattatcctacacctataaaagctctcctccattagggggcaaaagaatctagcccgagaaggacaatgtggaaataaaccaatgagatcagcacttcccaccaccccagtttccagggggagctctgtggctctccctaacctgctgagtaagaggcaaggctgaagccaggccccagccccttggttstgggccagcctcactgaaagctctggccacagcactggaagagactctttatattgtacccacctttcccctgatcgggaggagggagggcattttataacctcacctgccctgttctaacttattcatgtgtttcaaaataacatatattaatacatatttattttggattataaaaattatccatgtcccttgtagaaaatgtgaaaagtacaggcaygcaccaaagagaaatcagtctcctgaaacctcatcattcagacagactcatgggacacttcacattcagatgtgatcctttttattttaatttctttatcatttattttggtccctcacattataaaactttttccatggcagtggttctcaatcttcttaaccctatcgttttttaaattgtgataaaatatgtataaaataatgtttactgttttagtcatttttaagtgtacaaattcaatggcattaagcacattgaccatgttatacaagcatcaccactatttatctccagaactttctcatcatcctraactgaaactgcatacccattaaataactcccagctgggcgcagtggctcatgcctgtaatcccagcactttgggaggccaaggcaggtggataacctgaggttgggagttctagaccagcctagccaacaggtgaaaccctgtctctactaaaaatacaaaaattagctggttgtgatggcacacacctgtaatcccagctacttgagaggctgaggtggaagaattgcttgaacccaggaggtggaggttgcagtgagctgagatcatgccactgcactccagcctgggcaacagagtgagactctgtctcaaaaaataataaataataataataataacttccttcagaggagtttttattaaatgggttatttattatgggagagcttattttatttagctattatttattatgatagagcaattttatttagctgtacatttattttttaagtatttttaaagatatcataggtagtttgctaattttagagggaaataatggtatttgcaagctaccgctaaccaaatagttattagcccagcaaaagtctggttgcttttacatacagaaacctaagaatgtgcatttttacatgttgaaaatataaatagcaaatattttaaagtaaatagtacaattaaacattagtggtagccccactattgaggaaaatactcagagatatatccagatcctatatgaaaaacgaatctgaagattacgtgcatttctcttggtgtgagaccagaatctccctctctgtgtgtgtgtcaaggtatgttagcccaggagcttgctaagcaggaaggaagttttctaaaatcaggagaagacagctgacataaattttagcygacaggatggcatggctgtgggccctgatggacactggctccgcctgtgtgtgctcatgcagaggttactcacacacactcgatgtgacactctgtgctcacstggatgagaaccagacctgcgtgatggagagaaggacacttggaagtgtccactttctcatgaaatttcatgccactttctcatgaaattctaaccaccactgccacctccttcttctttctcaatgggattcaggcttcctagaattactgcctaaaccagtaattttaaagtaaagacctggagtctggttggggcattgtaaattgtrgaaggggggaagtgggggactataagggactggaagggggtgtccacctttgtcttcctaagaggtatgaaatggttaagagtgtggaacctggagacagaattcctaggttctcatcttggctccacttgctagccaggtaaacttgagcaaggaatcaatctctcttcatctcagtttcttatctgtaaaacatagatagtgccttagatcaagctccttgtaaatagagatgggacatctttgcagaaggtttgtcagagagcatgctctggatacacctgtagggaagtgaaggggacagaacmagagcaagaagctgatggcagtgtggctgcaactgaggctccagctgattctggtagctctggagctgtgatggagcagaggctgggcccaggtgtcctcttatcagctagtcactggccctaggagcaggtgtatccttagccaaggcagttcctcatggtggagggtaattmgcagtaaggaagtaggctgggaccttcagtagccaatattctcaggagctggggaatgatggtgctttggccctaaagaggccaaaatactgggcaagccccccagttacccctatagataacaacggggcctaccttaaagggctgtgasgattaaaraggtttatacatgttgagtgcctgggacacagtatgtgctgaattagtgcaaggatgacaaggaagaatgtatttggataccaacttcacagtcttctagaccctcaaacacctataattaattttccatgggattctgtggttggtgggtccccaaccagctgcttcagttggattcttgcagctcttgccatctttggtaattcacattctgacattcatatgcacgcaaacacactcacatgcatgcatgcacacacacatccctaaatatgtggtctatgggtattcatattcatcatgtatacagctatgtatcaacgtattccaggagttttcaaacttgtttttcaaaggagattttacctagaagcccgatattagtgtccttcatttaacatttatgttagtattaacattgcctttaatattacattttctttttccaatttgctctttggaagactttgctgactgtccctttggatttaaaaattagtaagcaaatttctgcagtaacaaagaagaagcaaagccttcatggggaacctgggtctgagctgtcaggtcatctcacaggaggcaggccctggaggacagcctggcagcaatggcagcttttccaatagagcaacaggtgcccaagaaggaaccacggtagctggtatccagacccacactctttattttaatgttgcatgtttatttgaatgtgcactgtaaaaatataaccagcatttaaggtagcgagataagcactcttttttcagttttttttttaaggcagatatttagtaaaggaaagcacagatggcgggtagatattgtgaaaaccatgagggtggcacacgtatgacaaggtttgggaaacagtgacctccttattgctttatctttatgttaagtcactgtggtcatccccttaaaagcttaagaaatgaatcagaagagagtgggaaagagaatgagaaagagagagagagagaagggagagggatccaccagcagcagcagcacattgattttcttggccagcttgtgtagttaccaaagcagcaaacagtactgtgctttttacgcatgaggtttttgtggtagggttaatagcctttttgtttaatgccctttcacctcattcccatgttttcagtaataaaaaatggtggcaggccagggagtgggtgtccactgaacagagcagagtcaaactactcttagaaacatggccctcagaccccagcagcacaatgtagaaatccttgaattcaccctcttttgcaataattttgattccagttaattcattcgcttgcatgaattaacttctactaccaactccttgagggtagggtctttctgagatttatctctgttttcagtttctagcacatggcctggactataattgaagttagtgaacagatacatcagagagacttttatcatccctgtcccctacttcttgaatgtctcctcagggttttacacataatagatacacaggaaggctggttgaatgtatgggcagatgggtagagtggtggagacatgggttgggggatgggtggaggggtgggaatgtgagtagatagttggatggctgagtggaaggagtgaatggcgaatgagtgatgaatatgtgggtaggtgtatagatatagatggatggatggatggatggatggatggatggatggatggatggataggtagatggatatagatggagggataacgtgtgggtaggtaaatatggatggataaatgggtggatggatggatggatggatggatagatgtgtggacaggtggatggatacagatgggtggatggatgaatggatacgtgggtaggtggatagatgtggatggatggttggataaatgaatgagtatgtgggtagatggatgcatgggtgaatgaatgaatggatgagcatttaggtagatggatggatgggtatgtgggtggtgggtaggtggatggatggataggtgcatagatagatggacggatggatggatagatgtgtggacagcggatggatacagatgggtggatggatggacgtgtgggtaggtcaatagctataggtgcatggatggataaatggatgagtatgtaggtggatggatggatggatggatatatgggtggatgggtgggtggatggatggatggatagttatgtgaatagatatatgcacagatggatgtgtgggtagatggatggattaacaggaagatggcaggtgggcagataagaggacagacatagatgaatgagtggatgagtttgtgggtggatggatggatgaaaggatagatgtgtagataggtggatggatatagaggagtggatgtgtgtatggatgtgtgggtaggtggatggatatagatgaatggatggatagatggatgattatgtgagtagattgatggacaggtgggtgggtggatggatggagggatggatggatagacggtggttgtattgatagatgatagcaggtggatagctaggcaggtttgtggacaggcatagatgaatgggtggatgagtttgtgggtggaagggtgggtaactgagctagtgagtatgtgaacactaggcctaggagaggtaatttcagttcatgtgtctgctgcattttaatcaaagcacgtttctctagaaggatcttcagaggcaatggccctgatattttgactccttttctgtacaggtcctgacctctacaaagtgtttgccacattttctgatgtgaggtctcatcttgtcatctgactcacggaaatacatgttttatctgatgcctttattcctcactcacacttcaccctttcagtgtgaaagggcctcattaaaatctgtcctctacccagttactctttgagaaagttccttcttagggcatttctgctgtgaaatgtatcacaccgacccatgtgagtgccaacctgaatgctaaagactgttattagcagatttagcctagagatgtttcagagttgtcagttctgatgttcataggattatattttcaaacatcatcacacatcctctgtgacagacttgattactgtgatgaactagttttcttcttttgagaaacgttccagttgcaaaaatgattctgaaagtatttaagcaaaattctaggcaagagtgaagtgatgctgtttcttttgggcagctcatttagcttgctgggggaggcagcttggtgtaataggaggagcacggggcatggagcctgcagatcaaggttgcatgctgtccccagtgtcttagcagctggtgacctccgcaagtctctaatctttgtgttatcttctgcaaagtgaaaataatgaccagggacccctcactgggttgctctgaagatgaagcaaggaaggtgcacaacgaactgtaaagtgttgtggatgattgaaggatctgtggtagtagaagaaagaacgccatamtatatatatatatatatatatatatatatatatatatatatatatatatatatatatatatatatggtgtgtgtgtgtgtgtatatatatatatatggtatatttatgggtatatatatatatatatatatatggttgttgttgtttaaataacagaagaaatcagatattgacagtgaagaaattaactatatgtcctagggctaataaaacactctttctgggccatggaaggtttatcatcagtgatgggaccacaggtaaaaacttggtacaaccacagagacatgactgtttccctttgttcattcatttattctacagacatttacaaccacctatagtatgagraggataggggtggcggctgctgggggtacaactgtgagcagggcagatgtgatccctgtacccaggaggaaacagrtgaaaactgataatcatccgaataaccatttaaatataaatggtgaaaagtgctttgaaagaaagttacaggggtgcccataacgtggagacctgaagatgaaataaggaaggtgcataacaaactctaaagtgttgtggatgagtgacagactggggatcagtaaaggcttccctgagaaggtgactttgagttgagattgaagaacaaataggagctaactaggcaaagtgggtggaagagcatttctggaaaagggaagagcaggtgcaaaggccctggggttagagaaagtgtggcacctttgagaaagccagtgtggctggaataaagtgggatgagcctggagtggtgggtggaggccatgttatactaagaccagtggaaaagtgtctagcaagggagcaacctgactgctgtttttaagaagctccctctggctgtggtggggagagcaggtcagagcaaagcaacagcacctgcagggatgctggtatcagccatctcagtgatattgggtatagagaggagtggatggattcaaggcacacttcaggaagaaaactgatagggcttggtgttttaccagttacgacagaagagaggggatgatggagggtgtgctcctaatgcaattactttccattttgaactgaatggttctgaagttatatatactgtgagcattactatagtaaattaaagaaatacatcaatagattctacagtattttgcatactttaagcatctggataatctgaaaatttacttggcagcccagagaaaatggaatggtgcagctctttggcctgatcccacaggaaaacattccactcatgcagaagcaaagatcaggtccagaaggatgtttggcaaatgcgcattaaaaactgagaatatggagtgtgcagaagagctttgctctgagcctggccctttaggctttcatgatctatggaggcaaacatgataccaatgggcagaacccactccagcctaggtctacacatgaggttacaccaacattaagaaaacctccttgtgtgctgcccctacctacagaacagtgtgacctcaagacccactccccacaattcccctagtctttcctgtgtccctggaggcatctcagggtcctcacaaactgtccttgtttggcctggtggcacagcctccttggtgactctccatgcccgcagccacttgtggaggctgtcaccatcttattgccagatctttgttccccagtgccccaaaatgcatggggcttatacagggctgcggtgacctcagtcttcagtagggaagaaggctgttctgacacttgctgtatcacacttggtcaactgggcccagtggtgtgttggaattggtgtatatcagctgctgagagccgattgtgcacatctcttcccaacttcttattctatgaggttacgttagtagcttgaataggccatgatgggagtatttatgccatggtaatgggtaaacgctacaaatcagagcttccttcttctccccttcagagaccctgttgttgaacatttaccagcacaccactgactggcccagagctcagctgcttgtgccctgagccccaccatgttccctgttgtattagggttcactagagagacagaactaataggatagatgtctatataaaggtgagtttattaagragtattgactcayatgatcaaaaggtgaggtcccacaataggccatctgcaagctgaggagcaaggaagccagtccaagtcccaaagctgaagagcttggagtccaatgttcaagggcaggaagtatccagcatgggagaaagatgtaggctgagaagctaagccagtctagkcttttcacgttcttctgcctgcttttattctggctgcattggcagctgattagattgtgcccactcagattgagggtggacccacctttcccagccctcagtcccagactcagatgttaatctcctttggtaacaccctcacagacacacccaggaacaatacttcattggattgaaggattgtatccttcaatccaatcaagttgacattcaatattaaccatcccacctgtgaacattgtccctctgtcttccacctagccactctctccataaggttcagccctggtccctgagatcaggaccacattgtcttctgagcccccaccttccacagaaacatgcccaggtatcaatacattaaacatctctttgtctgggggctstggccccaggaatcatcagacagaaatgaatcaggcagggaaggaaagaaaggttgaagtagacatcaaagaggccttgaacatgtcctgtcccacatggacctcagttttctgggcctagaggwcatgatgtcccagtcttctttctcctcaatgccccaagcttgagggaatagtatgtaacttaatcttgaatatgtagaaaaaaacatataggatattgcctaacataaggtagaggctagcttgaaaaagtcttgaggttcaaggccttagtgtacagttaattactttcatgattcatcacctgcagactgtgactctagtatatccttagtgtaaatgtatgaaggcagtaattttgtacatgtgtatgtatgtgtacatgtctttacatacatgtatatacttacagacccatggcatataataaaacagtgacctagattctctctcaagcatgcaggatctttataagccatacgtagtgacagtttaatccacataatcactgtcaattccccttcactaatttggcagagtccctgcrgcatatgcagctctgcaatgctttacacagcgtacacaaaattccctgttcatcctccaatctagtaattccatcaactagcttatgaagagctgcttcagtaattcatgtttaatgaccttagctgctggacagatgtcttgagaattaaagtctcctgtgaacagagtatcctgagcttctaaactccagtgtaatggaaacacgtcccatttctcccacacacccccaaagtgatgggatttggagcagacatccagcctggggtcctctcctcrggctcacactgcccactctagcctttatgagtggtggtgaccagactggaggccatgggatttatctgacatgtcctgggttggacagtcagtgggcctcacgtggggctgagttctgtgcctcaattcatctgtaggatagaggagatggtgcctggcayggtcaaagagaccctcagagtgctcaggactcgggactccaaaataatggaaaagaaaaggtttatgatgagaaccaacatttactaagctcctgaagtactaaatttcctcggaacaagccctgtgagggagacacgattaggaccatcttatagaagaggaaactgaagatcaatgggttgtgtagcttgtcaaattcatgcaggtgggaaatgccaggatcctggtttgtgtgctggggtcagccacctctaatgctctgtttgttttatacccctcttccaccttcccacccacctcagtgggatttttagaaccaaagtttgcactgtcatgccagccgtgtttctacagagagatatatacagcgatcatcttcaactcctcccttccatctgccaagccctgctgactccacccccgtgaaatcccaaccaccacccctttttctctgtcccctctgccgctcattcattctggctcattctcacactcaccatattagccttcctaaataatctctggccatggtactccttattaaaaaccttccttgagccgggtgcagtgactcacgcctataatcctagcactttgggaggccaaggcagtggatcactttgagatcaggagttcaaaactagcctggccaacatggtgaaaccctgtctctactaaaaatacaaaaattagctgggcgtggtagcacatgcctgtagtcccagctacttgggaggctgaggcacaagaatcacttgaacccaggaggcagaggttgcagtgagccgagatcacaccactacacaccagcctgggcagcagaacgagactccatctcaaaaaatagtgataataaaataaaaatagtgataataaaataaatacaaaattagctgggcatggtggcaggtgcctgtaatcccagctacttgggaggctgaggcaggagaattgcttgaacctgggaggtggaggttgcagtgagatgagattgcaccactgcatttcagcctgggtgatagagtgagactctatcaaaaaaacaaaacaaaacaaaacaaaaaaaaacagacaaaaccttccatggctccccactgcctgtaggatatagcctggcattttaggaactccaccaccaggccatacttgtgtttccagctatttctctgaattctgctcttacccaggaggcatactagctactctcccacacatgcatcagaatttccaaacttcataactgtgcttatgtgggtttttttttctatcaccttttccatcatttatttattcaacgaataatttttgagaacttactatgtgccaagtactgccctaggagctaggaatacagctgtgaacaaaaccaaaatgaatccctttcttcagagagtttacagtctagtgccaggagcaaacaatcagttcttgccatattaaatgagaaaagtatacaggttgtcagaagacaatggttgctattccaaaagaaagaaagaaagatgtgtaggaggatgaggaggattggaaatgctaccagtggatggcgagaagagagttttaaacaggctggccagagaaggccacattgggaaggtaacatttgagaaaagcattgaaggaggtgagggaatgagttgtgcaagcgagtaggtaagagtgagccaagcagataagcagccagccaaagtccaggtgagagtatctggagttctggagttgggggcttccacttcccacttccaaccaagatggaggagtaatagggaccagatttaccctcctgctgtaaacaagttaaagaaaaaaaaaaaacagtccaaatactatgtgaaatgacagttttcagacatgggctacaagcagcagaggacagtgacccctgagaggaggagcacaaaggaagtgaatcttacaatcgcccagatgaccatctggagggtttccagcacaggaagggggaacccaaacagagcctggcagtcttgctgagttgcagagacagagatgagaattcagagacaaaggaggcagaagtttgcargcagagcaytggagaagagagagctgcatggagagggagaactatgcaggtctgctcacaccctcagctgagtacttactggcacatgtacagaggaaagcacttgagaccagggaaagaaccagcagaaaggaaaagacaggcagaaggatcctcagagctcaggcaggcctgggaatagttcatgttcccaccacgttgggtgggaaaaagtttaataaatcacaaggagaatactcagaagggggtcatctcaggagtggggtgaaatgaaccctagactaaaggcagctctggtcccacctaaaaaagcttaaaagcaagactcgaaagggtcaaactccttccaagtaacttaattatgtcccagacagaacttaagaatatttcaaggaacttttttttttttttttttttttgagacggagtctcgctctgtcgccaggctggagtacagtggcatgatcttggctcactgcaatctccacctcccgggttcaagcgattcccctgcctcagcctcctaagtagctgggactacagatgtgcaccaccaagcccggctaatttttttatttttattttagtagagacagggtttcaccatgttggccaggatggtgttgatctcctgaccttgtgatccacccgcctcggcctcccaaagggctgggattacaggcatgagccaccacgcccagcctcaaggagtatttttaaaagctaacacccaatgaagggtctgacatccagtgaaaaattaccaggcaggcaaagaagttggagtgtgtgggcatgacaaggaagccagtgtggctggaatggtatcagcaagggggagggaagttggagacaatgtcagagaaatctagattgcatcatcccagtaagctacttaaaaggactgtggccaactcagaagtcaagagaagacatctgttttctcgcctccccttccagactgaaaagctcccctgctttgttctgaagtccctgggaagacactgagtgaatggcttgtcctcaacaagctttggtcctgtcttcctgtaatccactgcctgcaagatgtgtgaccttggaaaatcttcctaaccaccatgccttgtttgcttgtttgactaaaattaatcatagtgtatcgcctacttctaaggagagtttgaagcagttctcaataaaaggcatgtacgtagcgaggtcactgacatagaagtcagaaatctaaaaccataaaatgtgatgacaaaaatatataccaaaatccggccaggcgtggtggctcatgcctgtaatcccagcactttgggaggctgaggtgggcggatcacttgaggtcaggagtccaagaccagcctggccagcatggtgaaacccggtcctctactaaaaatacaacaattggctgggcatggtggtgcatgcctgtgatcccagctactcaagaggctgatgcaggaggatcgcttgaactcgggaggtggaggttgcagtgagccgagattgcaccactgcactccagcctgggcagcggagcaacactttgtctcaaacacacacacacacacacacacacacacacacaccaaaaacctgggtgagtttttaatttaatcatgaaataaaatgaactggttgccatgtgataaagcgaaatgaacctcagtctcttcctctgtaaaatgaaatcaatggtctttgccaacctacccagaaagctgcctcaaggatcaccaaagatgtggatgagaatgtatcattcaggactcttttggtgcaagtgataggaaactgtacttaagcaaaggagcagtaaagtctaggatgaggtttctccagctctccatctctgggtctgctttctcctgggccaggtccattctaggcctatgcacagttgcttctgcttttcatcatgtcagcaccaagtccagcaaaaaagggaacccattttccttatagcaccagcaaaatccctgctagtcccgttagttttgattggctggctgacttgggtcatgtgcccatttctgaaccaatcacatagctagaatagtctgtattgattggcttagttccagtcatgtgatccatccctgcatagagccatcttcacagaacttcaaggctgagcatagggccaagtgggtctctctgtgttgtctctctacttttcttcttccttacacgcattttctcccctgctctggtgctctaggaggctgatcccatgatracatcccctgtcttctggtttctggttcaatataggcaagagattggagtccaggaggaaggagattggtcaggtgcagcctttgccttcctccctgctttggagctgcgtctcctgaaatacctgtgcccctccatggctgtggcttctccttcttgtctcccactttgttgaatctccagtgacactatttcctccttccgttctgaggtatggtagcaactcctgccattgctggtccatgggcacatcaccttcccttgtctactccctcaatctgccccctaccctgygagtagtttttaataaagtctcttcttttgagccatccaggatgaattatgtttcctcctgtggccctgtattagttatctgttaagtcgtaacaaatgatcccaaagtgtagtggcttaaaacaacaatacatgtttattatctcacatagtttctgtgggttaggaattcaggagtgacttagctgtaaggttctggcttggggtctctcggataatacaggcaagatgtcagtggggactgcagtcattctaaggctcactagtgctgggaggtttgctttcaagatgtctcccacaaatggctggcaagtggatgctggctatcaacaggactcagttcctcaggacccctccacagggctgcttgagtgtcttcatgatacggtggctggctttcaccagcatgagtaatccacagggctgcttgagtgtcttcatgatacggtggctggctttcaccagcatgagtaataaagaaaacaactgaggctgcggcatctttttatgacctactcttggaaagtacacactgccatttctctagacatatcctacaagttacacgggccagccctattcaatgtggaaggggatgatggaatttggtagtgaccgccaggaggcaagagtcatttggggccaccttagagtgtggttatcaaagaccctggctgacatagtctctcaattaaaaccatccaaagggggatgggttgctgagcaagaaaaataaatgtgcactctgaagtgcattggcagctataaaccaggtacaagtcctgtaaatataagaaactgtgactcttgaattctctagcagttcacgtaagttgaccagagggcttagaagagccatagtaaatgggaatgaggacgcccccaagcccaggccagaggtgggaggggaaaggagagaacccaagtggttcattgattcatcttccccagcttctcctgacctcactccagccctacaaacagcctaagacactcaactgtgtttgttcatagtctgctcctgacatctcacagccttcattctggtttctgccgctagaagaacctcctgaccctcctcaggcaaacactgggaccatcaaagcagcagccctgccttccatttctctttccttttttgctaacacctgtctcttttgtttgtttgttttcgagacagattcttgttctgtcacgcaggctggagtacagtggcacaatctctgctcastgcaacctccacctccccggctcaagcaattctcgtgcctcagcctcccaagtagctgggattacagacataggttaccacacccagctaactttttgtatttttagtagagactgagtttcacyatgttagccaggctgatcttgaactyctggcctcaagttgatctgcccacctcggcctccctcccaaagtgctagaattacagcatgagccaccactcctggcctgctaacacttttctcttaatggaagatattttagctgatggaagatttttaggcttagtccatgaaaccaatagtcccccaactcycttgtggagccatctgggtttctagttggggagttgagccaaaagggagaatgggttctcaatcaggcatgccagggacacctgtctgccagcccagcccactgtttccaaggttgggggctcaactggtgactcatcaaactcagagctgagcactgtgagatccaggagagcctgggagactgtcctagccagtactccttgccctcactctaacacacacgtgtgcatacacacactggcagatgcaggctcacacacaccattttgcaaatggagaaacctatacacggagccagcatgccatcttgggattgctatttcagtgccctttacaccactctgtgctttaagtcctggataggttatgtgtcacactgcgctgactctgagtaggcaaagcaacatgatgttctctttgcctaagcatgacccgtaaaggggatggatgccctggctcaaaccttggcaggaggcccctgcagctgacaaagtgtctacacttcttagcctgggattcaagacctgcctccccacccctcatgtgccagccttctgagctcctcacagccctatgtatgtcctctccgtttcttcattcatttgtccatccattcacttacaactatctatggagcacctattacatactacgtgcatttctagcattggaatacaattgtgaaaaagcagacaacctcatcctccagcgctgcctcctacatgaagccttcccggacctgccctgaatgagtaagctaagccagaggaggcctacagccaacccrgggtaggactactacagtgcttctcctgctctcctgctggggttggaggggaagtaactggcttcagagttccgcagacctgagctcggatcccagctctgccactcaaagtcatagctgtgaccttgtgactcaatgactcacctgtctgagcctcatttttgtcaaccaggaaatgggaaggtggtaatatccaccaggcctgtggcccacctggtttgcccaggtttggagcctttgaacaccagtggagaccaattaggcacttggccttgcagtaggaccagagccatggaatgcctgtttgctctgcgtgttatacctagagcccagcacagtgcgtggcccagaagagactgatcmcaaaaatgtgatgaaagaatgagtgcacaaatgactaattgaatgaacaaacacatgtgtaccaagcacagacctcctcaactctggttggtttcccctgcccttaaggtaaagtctaggttcaattttacttcgtttaacctccttcaggtacagagaatttagttgctttcagtcatcagttcgtgacagttaacatcactgcttcagggaaggctcggctctgttacattcattcattcattcattcattcacccattcattccttttcatccccatttctcactgccattccctatgtctgtccaattgtaccttttttggtatatggttttgcaaaatgtgtgttattatttgtatttatgtaaatgtattatatatataatatatatcctcttttttcttccttttcattaagcagtgtgcttttgttcttttggcttaggattgacttggcgatgcgggctcttttttggttccatatgaactttaaagtagttttttccaattctgtgaagacagtcattggtagcttgatggggatggcattgaatctataaattaccttgggcagtatggccattttcacgatattgattcttcctacccatgagcatggaatgttcttccatttgtttctatcctcttttatttcattgagcagtggtttgtagttcgccttgaagaggtccttcacgtcccttgtaagttggattcctaagtattttattctctttgaagcaattgtgaatgggagttcactcatgatttggctctctgtttgtctgttattggtgtataagaatgcttgtgatttttgtacattgattttgtatcctgagactttgctgaagttgcttatcagcttaaggagattttgggctgagacaatggggttttctagatatacaatcatgtcgtctgcaaacaggggcaatttgacttcctcttttcctaattgaataccctttatttccttctcctgcctaattgccctggccagcacttccaacactatgttgaataggagtggtgagagagggcatccctgtcttgtgcccgttttcaaagggaatgcttccagtttttgcccattcagtatgatattggctgtgggtttgtcatagatagctcttattattttgagatacgtcccatcaatacctaatttattgagagtttttagcatgaagcgttgttgaattttgtcaaaggccttttctgcatctattgagataatcatgtggttttttgtctttggttctgtttatatgctggattacatttattgattttcgtatattgaaccagccttgcatcccagggatgaagcccacttgatcatggtggataagctttttgatgtgctgctggattcggtttgccagtattttattgaggatttttgtatcaatgttcatcatgatacctgacttcaaactatactacaaggctacagtaaccaaaacagcatggtactggtaccaaaacagagatatagatcagatatagatatagatatagaacagaacggagccctcagaaataacgccgcatatctacaactatctgatctttgacaaacctgacaaaagcaagcaatggggaaaggatcccctatttaataaatggtgctgggaaaactggctagccatatgtagaaagctgaaactggatcccttccttacaccttatacaaaaattaattcaagatggattaaagacttaaacgttacacctaaaaccataaaaaccctagaagaaaacctaggcattaccattcaggacataggcatgggcaaggacttcatgtctaaaacaccaaaagcaatggcaacaaaagacaaaattgacaaatgggatctaattaaactaaagtgcttctgcacagcaaaagaaactaccatcagagtgaacaggcaacctacagaatgggagaaaatttttgcaacctactcatctgacaaagggctaatatccagaatctacaawgaactcaaacaaatttacaagaaaaaaacaaccccatcaaaaagtgggcaaaggttatgaacagacacttctcaaaagaagacatttatgcagccaaagacacatgaaaaaatgctcatcgtcactggccatcagagaaatgcaaatcaaaaccacaatgagataccatctcacaccagttagaatggcgatcattaaaaagtcaggacaacaggtgctggagaggatgtggagaaataggaacacttttacactgttggtgggactgtaaactagttcaaccattgtggaagtcagtgcggcgattcctcagggatccagaagtagaaataccatttgacccagccatcccattactgggtatatacccaaaggactataaatcatgctgctataaagacacatgcacacgtgtgtttattgtggcactattcacaatagcaaagacttggaaccaacccaaatgtccaacaatgatagactgggttaagcaaatgtggcacatatacaccatggaatactgtgcagccttaaaaaatgatgagttcatgtcctttgtagggacatggatgaaattggaaatcatcattctcagtaaactatcgcaaggacaaaaaaccaaacaccgcawgttctcactcatagatgggaattgaacagtgagaacacatggacacaggaaggggaacatcacactctggggactgttgtggggtagggggaggggggagggatagcattgggagatatacctaatgctaaatgacgagttaatgggtgcagcacaccagcatggcacatgtatacatatgtaactaacctgcacattgtgcacatgtaccctaaaactttaatagttaaaaaaaaagcagtgtgcttttaatatctatccttccattacatctaatctgctggttatgattctctctaggtcacctccatcacacacagacacacacacagacacacacacacacacacacacacaggtgcattaagcagccttctaaatgtccacttatgagaatttcttaggctgtttcccaggagtgaaattctgggtcaaagagtatatggacacttaattcgactaagtagtgccagacgctgtcctgaatgcctgctcctgtgacatcccaccagaagtgcctgaggccccatgtctctgtcttcaccaatacctagaattgtctgtatttctaagtgttgccatgtattagatgtaaagcaacatcactttaattttctctaatttctaatgatattaagcatcttttcatgtgcctactgtcttctggttttttctcttttgtaaattgctttttcagatgcttcacccatttttctgttggggttgctgtctttatattgttgattttcaggcactccatggataatctgggtgttaagaccacgttgattttagaccttacaaaaatcttctttcattctattgtctgtttgtccaggatgtcctttgtctaggaaatgctcaattttgatataatcaaattaatcagtttttgggctaacggtttgtgctttggaagttttgtttgagaagttctgcctctgggtttcaaagatattcccctacattttctcctgttaactttacctttctcatttaaacctttacttggtcacgtatccactcttgtttatggattttggcataagttttgctttcccttatatagtcaaccagttttccaactgtcatctgttaaacaattaaacatccctttgatttatggtgccatgtttttggaaattaaatttccttccaaaaatgtgcttacctattaaccctttattccagaggtttccaaactttctcagtttaaagcacccttagtgactcagtaattttttcacggcattttttcacacaatatttttttctctaagccaaaagaaatactacaagtttctaagcagttaggtccaaacaactaaataaatatttaaatcctgacaacttagtagccattcaaaaaagtaatgcacagaaattgaaacaaaaagtaaagttttaattttattcctgaatgagtacagttccttactaatggaatagggagctggacagcttctgaaaccttggaataagattgtacattgtttcctgttcctcgtcgatttttacacattgtttcctgttcctcgtcgatttttatacatacttgcttttcgtcacagcaaccactgaaaacccagtttcacaaagaggcgatgtcatcaaaatgatgtggcacaatctaatgttgagactgtgaattacttcaagctagtagttcacatggtgtatgatcaatgttaaatatcactgtttccctcagaaatttaaaatatgccacaatacccctgcgagttcactctagtaccctgggacacctcggggcccagtttgggaaccatggttctgttctcttctactggcttgtttgtttttgaaccaaaaccatctgttcctcttagtgtggctttctaatatgccttaatatctggcaaagcaagagatctccgctttccattctttgttggtgtgactttgctacaggcctttcttcacctgctccctgcctgccttcagagctttatctctcttctgccacccttcaacctagaactatttctgcttcctactctctgcctactttcccacctccaggcctttacacaggtgattccttcttcctggtacactctcaccatccccaaccttcccttttgcctggtgatctctccctagcgcttctgggctcactttgagaaaccctctctccaggaagccctctgtgagcctgggctggatagattccccacagcccaggccctctgccaatcagggcactcgtgcctttgtgctgtggttatctataggtctgtctcctccactagactgtgggcttcctgagggcagggactaagtcttggggattgttgtatctccagtacctggcctagtctgatgcacagccagtactcaacaaaaaaagtgtaaattcccggccacacactctttgcatgaacccagcgcttcactcttctaaaagccctgcacakgcctttgctcctcctaccagcctggcagcagggatgagcacagccactggggctctggcgggagagtcagtcgaggccggctgaggctggcattccagttaggcraggctccaggtgggctggggctgagccaggcatgggacaacggaggggctcctctgctggctggagctcaccgaggacttgtatatccagaggggcaaggagggccaggtggggggagctagggtatccctgcagagcatgtggcctcccctcctccgagacaagagttcaagaacactttttgcccttcctttcccttcatcacaccaccacccctactggccctataccagaccttccaagccagagagcgtctccaagatttggagagcctcctgtctgacccagcatcttacgtacaacctgatgtcagctgcttgggagccagaaacgttgtcaggaggctccatccctcagtttggggatgcccacaactaacctcaagacttctccaaattcctggaggactcgcgctctcctgctcctgcctctgctgaattcactcgggaattggaccacttcctgatccctcaggtgttcctccactcagagccacattgatccatgcaagatatgcagcctcctcctctatttctacacccatacaaaacaagacacaaaaactgtcctctctgacaaggccttctgaggggatgtcaatgaagatttaggggccaggcagagcagggttgtatcagagaaagtaattggagcagcatcaagctgaacatgagaagcccctgacctgggccctccgcagccacccttgggtggtctccacctcccactcctctttgcctaacagtttgcactatgaaattttgtttgagaggttcttccgctcctcccaggtcctgtcctcaggaggaaaatgaactccagcctattttctcagcagagtggctggccgcccccgacggccatggtctttcctacccagaaacacatggaggttctttcttccccaccaggaggcaccaagatcgtctgctctttaagagkaattctgggcccagctttagatcatatcaactttatctccttacaccctaggagacactgcaaccagtgtgactgggggatcccagagtagaacccaggagccccacctcccagcaggataccctttctgagtcaccaaatcttgtccatttttcctttcctatttctctgatctgcatctttttctcttcctgcctgagctcccttgcctggcgcctggacggctgctgcaccagctgcctaatttgagccctgctccaccgcccccccgggccaatctgcagcccaccctggcttaaagcgaagattccaacagattgcaaattgcatctctcagactttcaggtcagctggtcagcaatttggttttcctggtggagcctaatctatttaacaaaaatagaacctacagtaaagcaaaaatcaaatacttctaatcgtagggatgcttgcatctgcaaatgaccagaaaagaaggaaccatgggtgggggtggtgaggagcctgggcagaggcttggtgatgcatggcgctgtagctacaaagctcccttggctcagccacccacccaggaacctgggcaaagatgccagccactgctctggtcagttctcctctgccaactctgtaggcatcaccctccatctgtctgcccaaaccagaaagctgggagccattcttccctgcattcactcctcacttccggggtatctttaaggcttgttgattccacctccacttccttcccatttacatatatacatattgtgttgttgttgttttgttttttgttttttggatttttgggtttttttgttgttgttgttgttgtttgagacagggtctcactctgtcacccaggctggagtacactggcacaatcatagctcactgcagccctgacctcctaggcttaaacaatcctctcacctcagccccctgagtagctgagactagaggagtgcaccaccacacttggttaattttttattttttatagggacggggtctcgctatgttgcctagcctggtcttgaactccaggctcaagcaatctcccacttggcctcccaaaatgctgggattacaggcatgaaccaccatgcccagcctccctcccacctcatgcatcatctactttgctccttccacatcatcctcctctcccatggattccacagcttcccactggctgccttgcttccagtccttcccccatgcccatccattttccacaaaagggaaagagctcgttgcacctgctatctcctggccaacaccccttttgtggccccttatttggggcataaggtccaaagccctgcctgatgtggctcctgcattctctgcctcccaccagccctccaccccatgcacaccacccacagcaacctcaccctcctttctactcctccaaagagccacactgtctcttgcctctaggctttgcatgcactgttccctctgcctagaacatttcctctcccatcttctttgcctgggtaacatggtcattcttctctgtacccctaagccaccccctcaaagagaggtgcccttcctttgtgctgccagccctctgtacccactctctcctagcaactcacattaccttataatagtcttacacaaaaaaattctgtcatctctgttagactgggagcttctagaagacaacgattttgtctttttcattgtaacactgcagggtctagcatgctgtgtcccagagcaggcactcaacaaacattgtatgtggccagttgtcccctcattttatcaatgaggaaactggggcccagagaagggaaggaacacaattatgaatacacatggagttggggacagaactgggactagaaccccgaactactcactgtaagccccaagccctttctggtttaattgyaaagaaatagtgttagccaacatcatttggcccatgggatgcaggtcccgagggcccagcagcctccagggcatcttgatctcccaacctgtgatcaccttcaggcctctgtgacaagtagctcctccaccttgggccactctgcatgtctctcagtcctcttaccctggggagctaactgagcaaatgctcttggccagtgtccattctctctccttcgtagctcttcctgagagatcctgctccttggcccaccaacactggggaacmcagtccattcaactcaactcaactcartgcaacgtaaccaatagtcctgcatcctgctgcttcccagcccttgaagaggaaagagcactttcctgccctcggaagcttcatccagcaggaggcaattaccatattcagctcagggtgtggaggaaggagccgggagcattgccgttgccaaagaggacatgaacaggggaggccactttaattgggacctaacataggaggcttgtgcttggaggaccaagtcccaaaaccacatggtagatggagaggaggagtccagtctgaaaaacagaagccactctaggcatttcaaacagaggggatttaatacaaggaattgtttaataggtgatgggaggaggaaggagtacagaaggagcactgaagcagtcaacggataccagctgcagaaagaaacagctactgcccctagggctaggaaaatgaaaggacagagatgagcttttcagaacccaggagctcagaggagaagccctgcacagctagtattctgatgtctgaagaggggcatgtctgcccgatgtctgatggcccctcaaagggacatagcagggctggtgctgaaagcgcagaaagaagctagaggcaggaccctgcctgacaggaacaggagagcagggagtccccatcatccccttccactctacctcagagcctcctgttggcggaagctaacaggacagagtctgggagatgtggcttgtggagccctggccctagcatcacagagcaggatagagagggcaggcttgggagctgagaaacagtaggtaaatatttggcacaagccccttctctccagctagtcccatkctgatttgtggcctcctcgcttgtttctgggaagagattatcacccagttgtgcaggtaaaaacagggcattttgcattcacaatcttaatttggaagccagagaggactggcttggttatgggtgtgctggagccagctcctgcaggctccagagagagctgagagccagttgttaaattatcaggaatttgtgagccagctgttaaatcattgatagcttgaaatctaccatggtgggtgtatttacaccacrgaaattggcaaacactacacatcagagctcttttttcttctccccaaaaagccagctgttaaacattaaccaacacatccctgactacctatctttcctcctcctctgcctactcctactacacccacacaccatccctctagcccaaggtcacgtggtacttactccagtcccctgcagagagctcattttctgatcaatgactccttctcgcaaacaggagggagaatggcatgttgttagaagcatgagcttaaagttgacacaactgaggtgggtcccagtccttttgcctactcgttatgtgaccctaggcaaagtcctgacctctcaggctctcagtttccagtttcctcatctgtaaaatggagatcatcatacatacctcattccattgagggtgttgttgaatatctattaataaaggagaaccccaggggaaaaaaatcttaaataacgcacacaaatgtttcagcaaagctaaaagtagcttgcacaatatcatctctgcacgttttgccragggaagcctgagcacagagatgaaaaggcgcttgccccagcttcccttcccagaaaatggccaagttcagcctgaatctgaacttgttcattgctctctttgttattcgactttgagagggaaacgggcttacgtttgcacagayaaaacagtaaataaattaatctgtaaaattattagtaaaatagtaaaaaaattaatctatttcaagagggagtattagtttattgctgatgatattgctatttttgccggtaaaatgtgcctccttatcacatctttttaaaaagtttttaataaagttttcttgttattaaaataatacccatttattatagaatataggtaaagtattaaaaagtaaaaataaaaagcgataatcacactcccgggaccaaccagtgttaacgtttttactttgtgggggtaatttttacgtaattgcgagtatactgtatatacaatttttatcctttgttttgttttttacttttttaattcattatagtattaggagaaataacactagctgctgtaaccgagttatctgagaatcttggtggactaacacagtaaaattttatttatctcttatataaagtccaaagtgggtccttctggttgttagcctttccacgtgatcattcgtggacccaagctcctctgtctcatgtccccactgttccttaggcctcagggttctccgatagatcctatcaatctggttgacaggggggaaaacggggaagcatgaaggatcaggaacttgtgagaggttttcatggtccaggcctggagtaccatgtccctcccacccacattccattggtaggactgtcacatggccgcacccaaccgtcaggaagcctggaaaacctagtctggccatgtgcctaggaggaaaaggaaatgaatttggtcaacagctagccagcgactggcacaattggaatatcacttgttctaacctttgataacttttataatataatacttaagtctataggacttagatcaagtcaccccctcattaaaacccttcagttgctcctcttgcattcaaaatgaagctcagcatccttggcatagctggtaaggttctgcgtggccttgcacctgtccaccttgccggtcacattccttgctcagctgctcttcaatgaccatttacagctttatcggcactgtttcaggtccttggatttcccaatctctttcctgcctcaggacctttgcacttgcaatttcctccttccaggatattctcccccttgctctcggctcagccagctccttcaggtttcagtgcaaatgccaccttcctggaaaggccctccttggcctccagtctaaattagggtcttcctgtagttttctcttttggagccctgctcttttcctttatgtcactgatcacagtttgtaatcctctatttatccgtgtgtttattgcttaatgtctctgtcttccaccagaccctacacttcatgcaatctaggaccatgttgattttgctcactgtttgatctggtgcctgtctggcacatcataggtgcccaacaggacttgctgattgaatgcacgtatcctaatatttcatcatgtgtctgtattaaaatttacttcacttttcccgtacttcttagacactcatttacacctgatattttgttgttctaaataagcctgactctcttattataataagtggaaggaaagagagggagttgctccacccttcctgggccatccacccagccatcttctctaggtccccgcttccctccacygcacacagccccaccttargccaccacatgctttgtggagggtcactacttgcaccctctgagccgtctggttatggtccctcagaaagatgcccctgcatccttattgtccacccgccgaaggctggcagtgggacagaccccacctcccatyctgctccttctttcagttccctgcaaacctactgctctaggctctatgagtgcatcaaacattcctgaaggcttgtgtctaacaaaagaatttttggtgtaagaaaatattttaaattgtgtacaaaatgtggcctcttctatagctcaaggggacataaagaaaaaaaaaagaatattttttaaactttacagaacatgtgggtggatatactcaattatttttctctctctctcttttatatcctgccatccctgtggaaacagagggcaccttctccttcaagcctgtgtcatgcagatctccaccctttatgcaacccctgacaagcaatttaaccccagtgttttctcaaagtctgcattgtttctttgagaccagtgctgtcctgggaggagggctggcagcagaacagtccacgatgggcttggatccctcacacagacattgatctgctggcccctgcaacagaacttaccagggtcccccatggtctttgtaggggccttaggagagctttccccttggctgtctgaaggttcactggaaaatcaacttccaattggggaaaaggcattcacatgtatttaatatatatacatgggagccttcagaatgaagacccagagatacaggggaaattgtctatttttatgcttagattcaataaagtctagacagccgcgtaggaatgtgattggactaaaaggctctgatccaatgctgatagactgagtggggaacccagcaaggcctgtctgtctaggttcttcttgacctctctgagcactcattccttccttctggaagcgcagggctctctccggaatgggggtcgcatgacctacagtcaaataagctaagttacatgatttcttcatagccagtttttacacagaaacttggagggaacactggcgtaatattttacattttatggctagtttctctgacccgctttggggaagagggattggagtttctgtgattggccccagaggagcaagggactgagggacaggaggccaggagaaggtcagagaaaaactttggcttctgaggagacttctgaggccttccttttggagtattgttttcagagccctaacacccttcaacctccattaacttaagacattttcctgccagtgtgatgtgtcaggacagatcttatttctcacagcacaagtcaaatcctcagtgaggatgcatgctcacacctcccaaaggcacactcgacaacccggagataagagtgcagtctagagtcatatttaggaagaaaatccttccctaagtacactgtgatctgcagagactgtccctcagtaggcccagggctccagaatattaggctgagcccagcgagtcttcactcagagtagcttcacgcccctgcccaggcgttgcctgtaacactggctgaagcatgaaagctccccttcttgcctccctgaccctacaccagatcttgttctcagggagagtatctctgccttccactgtgaaatttaagaaggaaaaaagagaggccccaacaaagggcttaacctataagactcataaacttgttggagtgaattttactcatgcttagtagttaagtattaaagatgaacaatgaaaacagagaattagtttttctaagaggaggctgttaaatcctactggcttctagaatccttagtgtccattttactccccactaacttttctgrggattctgaactgacatcagatgggattttgcagccgggtgcagtggttcacaactataatcccagcacttttcaggggagccgaggtgggatgatcatttgaggccgggagtttgagacctgcttgggcaacatactgagacccctatctcaacaacaaataaattgttttaaaaattagctggttgtggtgacaagcacctatggtcccagctacttgggaggctgaggtggaaggatcactcgagcccaggagctcgaggtttcagtgagctatgatggtaccactactctctagcctgggcagcagagcaataccctgtctcaaaacaaaacaaaaaaaaaaatgggattttactaactcaaggcattacaataacagttaccctttacaataagttaccccttgctgtgccccatccctggctattctcatttcataattatcttctttaattctcagaaacaaccctgagaaatttgtattgttcttactatttttcaagtagaagaactgatgctcagaaacgctcaatgagcatccaagctcacatggatggcaatatttactcttgttggcaaacgccaaaacttagggttttatccgtaagttaccctatacattctgaagatttcgctgaaggagaaaatgcagctttatggctcccaattaaacctgaactattagtttggattgatttttatgaaacagactgctttctttgacgttagcaacatctctttcagggggaaaaaaaatccttataagttatccacttggaactttcccttctgtgattttatttgtattccaaatctgctctgtggtcattcttataaactccttggaagttagaatccattatcaatcaccatccagtggagaaaacacaaaccacttcagtcatttcagagggagatttcatacaggaactggttccaactttgttggaagggatggtggaggaaaacaggtagagactgttgtggcagatacagttcttcagaaaattgccaygcccctygggcaggaagaatgaaagggaaagtgatgttgccattgcccctgaaatgcctgaagtggtttttgttttcttgactggatgttgattgataccagatcttacttccagggaatttataaaaatgaccacagagcagatttggaatacaaatgaaataatggagggaaagcccaggtagacaggcctccgaggctcctgctgctgctgtttctgctacttttggggccctatctctggccactgagcatgcagccaggggcccccacactccaacggttcaggaatcagaagctgctgggccccacagacacctgcagttactcgtagctccccttgctgcaaccagagcagaggaagaaaaaaaaaaaaaaaaaagcttttccctcatgcatgcttatgcgttctttctaatctcccatgaccgcttccctaaatggaaaccagctggcaggcgattctgggaaatgtrgtttcagggcttccagtccctgccacaaggaggagagtgtagaagagtgagtgtgaactgtgagccaccagacagttatcagcccccaccccggccagagttaccaaactcccttgccttagaatttaactcatcacctggattggtctcaaatgaatgtgatgattctgttacagccctggaattgcacaagacgaaagcttaaggagagtcatgatatttatctctacataaagactacatgtgctgggagaagtgcaacctttgtgggagggaaaccaaaaaaaaaaattccagctcaagctggggtgttaggaattgaagctggcctggctcccctggctgaactgcaggccacggtggctctgaaagcatctagtggcagcattgccccatctgttcccaccatgccctgttgctcagctccttcaggtggcaagaaagagccagccccagcgayctttgatgacagggtgtctgagacagggttacccagaaaacaggctctgagacaaagatttgcatacaggaagtttatcaggatatgttttcaggaacagaagctggaagggaggaagccaagtagcgctgggcagcgggagaagtcaaaatgtgatgcagtggcaatcatgagctcagccaatcccaggggacctcgggattccatggtccttcacgggtgtcctgaattgaggcagcagggctagatccatgacccttcacactgactgctagctgcaggttgcccccagggagggggcataacctgaactaacatagctctgattgggtgcaaggcatctcaacaggagccagatgctagccgctggggaggagggcctccatcctgggtggggtgtctgggcgcacccctggcatccaccacacaggataagaggagtcaaacggaagacaggcactgccctgggctcggtgcttagctacatttgccatgcagtctgagctgtggagggacagagtctggccaccagcctcactgaaaccaccatcttctcacacctggattactgagccagagcttccagagtctctgcttccacgtttgccacactaccatccattctgtaccccacagacagtgcaatcttctccaacctgaaatcacatcacaggctgctccgcttcacctccccaccctcatcgctgttcattagagtcatgtccagaccctttgtcatggtctctgggggcaatgtgacctggcccctgtccacctatgcatctgccaccgcccagccacaaccctgcctccctcactgtgttccggccatgctggccttttctgttccttgaacattccaagctcttccccacctgagggacttggccctggcttttgcctctggctagaatatttccttctttccagataggtctcagctttcttataacgtcttgagcggagtcttccctaactacccaactaaagcagctcccctagtaaattacctgggtgtaatgatgtgtgtgcctgtaatcgcaggctgaggcaggagggtcgcctgaacccagaaggtggaggctgcagtaagccaagatcgcacaactgcactccaggctggataacagagcgagaccctgtctcaaaaaaataaaaaataaaaaaagacttccttttcccatcacccttttgatcttctcatagcattcatcactaactgaaatttcttaagcattggaggacttgtttctgctatccctcctaatcaaataaaaagctctccaagagcaggcatcagtccctagaagggtatcgagcacgcagtaggtaaatatttttggaatgttgtaaattgaccaccttttaataagggggacacctattgggcagaacttcttgagaaccaccttactggcctgtggcctccctcatacctggtcttgtcaaggctgtcttggctggcacagtggtcccctatccagtcggcaatacttagggtagcagggatggcttcaccagtcaaacccaacagatgccatggtgaccctgatgcagaccctcaacatagccagttacacatccgtgtctccatcagcacttcgtcaccccagtcacagaagccctctactttctctcatcggtaggcagaatgcacagtgtctcgtgttgtttgggaagtcagtcatttgggggctgatgattctgggaggtgaagacatcgtggctgggggcccagtggtttccactttgtcagctgaaatcacctgagagttgaaactcgcttcccaagggctggaaagctctctggtgcttaacatcttttgatttcagctccccactattaaacatgtttaaataaaaattactactgccatttgctgagcacctgtcctgtaccaggacctgtgcttggtccataattcagagatgttctggaacttgcctgagagaggactgaacccagtttgtgagacacgctggcctacttccactgtaccacctgagaaattaaggagaaatcaaagagatgggaggagttcctgttagtacaaaatagttatatttagtaaaataaaatatgacagatcttgcttcaaaggtggactagttttgttcacaaagtaaaggaaggctcttctcacccccactcctgtatcattccatggaagctttgaataccattccacacactttgtaatttcactaataaagagtctgcagaatttgtgcgcattttaaatctagacacctgtggaattcttcaaagcttggcagaagattggtaaattagatccccatcctgtcagacaaaaaaaaaatttctccttgtggacagcctttcccactcaggcaaagtggtccatttacatagaaatgatccttttagaaggtgttttgtgattttcaattgtccctcgaaataaaaatcacagctcctgtctcaccttggttgaagtgttttcacactccagggagttgcttaccgtcacctgaatatagaattcggtgggcattagtttcaaactgatactactcacagctgtcttcagggtttcaaaaaggtgtccaggtggccttggaaggtgtttctcgttctgggatcaggctgagcgatccccctttattctggaagctgcagggcttcagtctttaggtttctgcctaaggaaaaatgcttcctggggttttctcccaagacttcagtggaacccagagtattgtctgtgctgttgcctgatgacacaaaagcataacagtgagagaaaagcaggatacctttaaaaccatttcttttcctaatttcacaataatgaaaagacaggaagaaacttatttctcgatcaagagcaacatgcyacagtgaagtagcatggacattaaaattaaacctgcatttgaatcccagcagcctcacttacagtgaccttgtgtgaagtccataacctctctcagtttcagtttcttgatctgcaaaatgggggtcatccccttatcacttacgtttggcatgaagattcagtgatatagtgtgtgtcaatttcctcgtatggctgcagaattttaggtgggccataaatcggaaagaagagatgacattccatctctaaattcctgatatatttagccaagcatttggaagccagcagggcagatgcaggagataacgctatgtttagcccccaaggtccctaatgaggggcactcagctgcctgtgacactagtcaggtctcgctggctcaagaagcttagttttttgctgcaccatagcttggttataattgggactgacgtcaccattcaggaaaaacttagaaaaacattctctattcctaataagaaataccaacagacctctagcacccttctggtcctgaagccaagcagactcagcaataccccgtatctttatgggtggggcacagggagaggagtcagggccgggcccaaagggcctcacctttgccgtcatctttccagcaccccagaagacgtcgtccccattatagcacggacacgtgggtgtttaattaatagtcatggtgatcatgatgatgcttatcttggcttcarttcacatgtgttagttccattattgattttgttctcctcaaattaaccagataaagtcacaaccaatttaaaaacaattagtttgattttcatctgtggtccagcgggaatctgtttttcctccagtattaataatcgcattgtacagttaatgaattgctgtgagatcagtggcgtttgggctaatgtggcatttctcttttattcttgtttgatttgttttgttttgtttttagggtcaagttgtattccggaatggggagagaatggggaccattaaatttactcaatttcaaggtaggcattttgatgcttattctttctagctgataaaatttagattcaggaatgttgttttatgcaatataatacatcaaaaggaatgcaagtgtgatgttccagataaaagaaagcagagccaattgaaaacacttttctgaaaacattagtttcaacctatttggaatatttttttctcagccgcatcatgatcagccctccatctccatgggttccacgtctgttgattcagccagctgaagactgaaactattcaggaaaaaaatggatgattccgtctgtaccaaatacatacagacttttttttcttgtcgttattccctaaacaatagagtataacaactatttacattttattaggcattgtaagaaatctagagatgatttaaagtatatgggaggatgtgtgtagtgtataggcaaatactaccccattttatatcagggacttggtcgttgggggattttggaatcctcaagggatcctggaaccaatcctccatggatccctagggataactgtgcttccctggcctattctgccttcccgcatgactctaaaaggtttatgagattatgagtggtggggattaagttagtattctgaggacctttgcattgttgtggggtttggggtgttttttgtagagaaagggtctcagtatgttgccctggctggagtgcagtggcaatccacagatgcgttcatagcatactgcagcctcgaactcctgggcccaagcagtcctcccacctcagcctcctaagtagctgggaccacagacatgcaacagtggcacccacctgtttttggttttgattttagagatgttcaaacagactctaaagtagagagaacagcatcatgaacccccatgtgcccaataggcagtttcaatcattatcgacattttgccaatcttctttcattttgactcaccccatcccccctttttttgctgtagtgttttaaagcagctcctagacacgatctcatctcattctataaatacttcagtatgcatttttttggatagggaggttttataatataatcacggtactattatcacacctaaaacattaaacaattcttaatatcgtttaatttcccagtctgtgtggatcccctgatcatctcaacgatgtcttcacagatgatttgttggaaaatccacacaaattccacccattgcatctgcttgaagtatctctttagtctcttttcatctattataacccaccactttttacagaacatttattttttgaagaaaccgggtcatgcgttgaactttctgttgctgtcagaagggcctcagaaaccatccagaccaatttctttgtgtgatgagggaaaaacggaggtgcagacaagggccatgtgaggagcatccttgaggaacagggctgggcattccttgaggcagaccagtacagccattagcggggtgattagccaaaacgactagatgaacctctcatcaatacagtgttcttgagcagccgagtgtttctggaaaacccagaaacaagagtggtgcctgctgtgcccactcactttgagcagatcccagcgccatccaggggaaagcaagaaattaaagtgagttattcagattcattcagacaaatcccaccaggattcagatcaatcaggagaggtgttcttcagcgctatcgctctgtaatgcaatcttgtagacatacccattcgtctttctgtggcaggtaattgaaacgcgtgtcagctctctggcgtgcacaaaagatgtaattttaggcaaacgtaattatttttccatttgttaaattttacttcttcattggttgaacaaagtaagcatcttggcaaagatacttactttttttttttttgagtgattgcaactaaattctcttgtctcatttccagttctcaaaattatatcattctaagaaagtattttgtaaaataaggattggctgatcacagctaccagtgcatgccaattgtattgccttttttttttcatacgttaggtttaaacaccagcttcagtcactatttaggcatatctggatttataaggaaggcagtacagcaaacagcagttcagagcttgcgctttgtgggtcgacccacccgagatccagtcacttcctcactgtagaatttcaggcaagcgacttcgcctctctgagccttgattgtcctcatctgtaaaataggagtataatcctaactaccttcatggaatatgggaaaaactaaatgagaaagtatgtgtatatttaactatacatacaatatatttatatatatgtatatatatatatatttttttttttctcagcaagtaagtagcaattatgattagcaccttgtcaacattatgacacctttctggggcaaattcaggtttccctgaagtgctgaaaccccctggctgcttttttgtctgccatttacccctaatagcggctccctgcacttagtgatgtataggaggtgatacaaggcagggccttagcgatgatctcattccagaattcatggtataaatggggaaactgaggtccagggatgagtagtgtctcccagggacacacagctggctagtggcagagcagggactggacctcagcttgctcttctgcacattcccacggacacccaggcacaagtgtgctcccctcaccctctctgcatttgtgtccagcttttcttgagggtcacagctgggccttcaataaaggccagatgctcctgtttacatgattttttttttttttttttttttttgagacggagtctcactgtgtcacccaggctggagtgcagtggcacaatctcggctcactgcaacctctgcctcctgggttcgagtgattcttctgcctcagcctcccgagtagctgggactacaggctcgtgccaccatgcccagctaatttttgtatttttagtagagatggggtttcaccatattggccaggctggtctcgaactcctgacctcgcagtctgcccacctcggcctcccaaagtgctgagattacaggcgtgagccactgcgcctggcctacatgtttttttaaacagacattgatcctcttgctccaatagagggaccttgtgttattttaggactgaaatgagccaccagaatgcagggggcatatgcgtatcaacacaacagttggttttccaaatgtaaagggtttcagaggtgccttatctaccaggatggattattgaataggccgtccaagctgtgcgatgagccatccagggagttaacgcctccaggagcagccctgtgtcagtgatggatgagaaggggaggataaataccccagcatcctttccccttgggtgaggcaactcccaggtgtgtttggctcttttcccagagctcccacagtaggactgagcctcggttgcccacaaagaaacctgctcactcatgcaccttgtcctggctcccttccctgcctcacttccccacaccactaacagcgcatcctaggatcaccttccaaataaactgcatgccttcttcccctcatctcaggcaggtgctattcttagggagccacccttggccgtaggtaaggcaggtattagcatcctgttgggcacacacctcaggcctgaacccctttcatctccagattccatgctcctccctgatgccatggctgattttcacgacaccacgtgtagatgaggatgaatactagagaattggcttttttccccttaagagaaaaaaagtatccatgttactgccgaagtctaaacatggctctgaatttgcagcagggaaggaagttgagtgaagccgtgattagagccttgtttatgctgttcttagagaaaactcagcatctgccgctccaactcaccgaccctgccttcattaggcctatttgtaagaatctcggggaatgataatgtgcttgaatttcacactgcttctatgcaacataaagggctcaggctttggagttttatattttggcacctgatttgaagggaaggggtcttccttcactctaacgacataattgtcattcagaacgtacctagtgaaagggagacttgtccttcccaattgcagacattaattaccatttggtcttcagggtaacagatacggttgtattcagtgcgcatttcctgagcatctgccaggcgctttaccaagtcctctggagaaaaccaagttgaataagatacagtccccgatcctccagggcttcataatctctctggccgaatgccagtgcttatgaaagcaggaagattatttcccagaacctactagaatactttcagggctagtttgaccctactttgagactcttgaggctgatttttaataaccttttcctctgtcaaggcctgcaattgtagctcgcttcaccaagtcatgggtctggaaaggccatttcgtcagactgtcactcaacttgatataattaaagagtggagtcatagtccataatccttcaggatataccagcagggttgtggacaagcaggaaccaggggacacacggaaatgtggactcttttccagcttgaccctagcctcgacacctcccagccctcatgttccaggatttgcctttcagggagcctaagaaaggtggcccaaaagacagcatattttacaggtattgggtttcattgagccatcgactctccatgttgaagggagccctgattctcttatacaacattcccactgcttgaatgcctccagtgatggggaactcattccctctcatgtggaaagtatataggcttgaagcagacatgcctgatcattgacagataggcaaagaagcttagtctctttgagccttcatttcagttaaaaataagtaaataaataaaagatgatcattttccttgccttgagagtgactgagaacctgatgatgtgaggctgtgatgttcctgtctcggggactggcacagagaagggtcataacaactgttggcttccttctctcttgggcactcttaacagtgaccccagatttacactctcccccgaggaatttcttgagaaaagtgcagtcgcgcttctttaggacacaattcgcacacctcatttcatgggcagtcattgtcgttggtccatgaaagtccctcttgtgtgtccatttatcccccttatttccctcctttattcccatatcccactcctacctcccccaaggaaaggcaaacaccccatattgtgtttgtgtgtgtgcttgcaagatgcgtgttgctccgtacatcagtgccactggcttaggtatcttttctgttctgttttgttttttccactcaacactttgtttctaaagacatctccatggtcctgggtgtgcttctaggcatggctcctccctgctccctgcaggagccatggtggggtgcatccatcacttcacccatccaggcccctgggacggacacccaggtcactttcaactctccaccctcacaaataatacatgtccttatatatgttcccttatggacccaactgggaatttccttaggacaggtttccaagagcagaattgctgagtcagaatctgtgtgcacattgaacatgcccaaaacctgccaggttgctctgcagaatggccttgcccatatccacacccactggcagaggattcctgtgtccctacctaccacccacatttgggatttcctggatccctcattttttgacggtctaaaagtataaagtaatatcatattgtgactttacgtatcgtttctctgattcctaatgagtttggatatttctttctgtgcttattagtcatttgttaattgtctgttctgatcctttgatcttttttcttttctttttttcttttttttttaaaaaaaaaaaaggcagggtctccctctgttgcctggggtggagtactacagtggcacaatcatagctcattgcagccttgaactcccaggtgtaagccatcctccttcctcagcctcccaagtagctgaactacaggcgtgcaccaccatgcctggctaggtttttttttttttttttttcatggaggtgggagtctcgctatgttgcccaagcaggtctcaaactcgtggcctgaagcgatcctcctgctgtctcagcctcccaaagtgctgagatcacaggtgtgagccaccgcacccagccctttgaccatttttattttgaagttactgtctttttcttgttggtctgcagaagttccttacataagctagatatcaatcccttattggctttaggctttgcaagtatcttctcccattctgtcacttgtctataaactaccttcaagtcctggttgagccttcaagttcttaattttgatgtagataaacccttttggtttttgtcctaaggtttgtgcttttgaagtttctcaacaattatttcctgtcactcctagcaggtgaccccctacctgccaggtgctggctggcactggttgggtatgggggttggtggggctgagtagggtaagatgcaatccttgccctcagggagcccacagcccatccagtgcaatgaggagtagacacagacaacagcaaagtgtgatgcgtgataagtgatggcacaggcagctgtgggcattcagaggagggcactcaggtctacctggcagaatctaggaaggatatctgagagcagtggcatccaagatgaattctttttttttttttttttgagatggagtcttgctttgtcacccaggctggagtacagtggcacaatctcagcccactgcaacatccgtcccaggttcaagcaattctcctgcctcagcctcccaaatagccaagattacaggcacgtgccaccgtgcctggctaattttagtatttttagtagagacggggtttcaccatgttggccaggctggtcttcaactcctgacctcatgatctgcccrcctcggcctcccaaagtgctgggattacaggcatgagccactacacccggccccaagatgaattctgaaggacctgagggaggttgccaagaagaagagaaaaagtgctcctggggcagacagcctattgcatatgacctgggtcccctcaggtacttagctcttgtccttgggccagtttgcctagatcgatggacacatctacccctggcagttactgtaccccagggtatttggccaatgtccacctagcctgttaaaaatctcaaaacaaaggtcagttaactaaacttatgaaaaatatggcaatagcgtattgtttgtgacagtagagcacaaagtctgtctctgttctatgctgctgagaggtaatgctgggagagggagagggagcagattgggatggggtggaagtgaaaaatcacttcctgagaaatggctgttcatcctggggaagagcagagttgaggcccatggttgccagattccaagtctgaaggatggtcaggagcaggagccgaagtgatctggggccccagcacagacccaggacccatgaggggacgtcacacagagcaggttttagcttggaatgaggaggacctttccaagcaattgcagcatcattgaacaggagtttggggctacagagatctcccatgcagccccctcacttagcaagacccaggttggggatgggacttccccagggctactcagagtgaccgcaaagccagcaccagcttgggggctcctgtcttctagctcagagctcttttctatgcctgagtttggggggtgggtcctagaattgagtacatttatagaatcttttatttttgttgagccaagrtcatcttttgtttcataccccagagttatacattgtgtctcagtgtgcgtgttttcaacaacaatcaaattctaaaggacacattctggctcccccaatttggagccagaaccaagtgagaagacaagtctacccctggcagttattacacccaccccaaataaaattggatacagactggatatagacatatccacatatagaccggttgaccttgtttgcacggtggagttaacaagcccaagagttaaaagctgagagggctgtgtgcctatcatggctaccacctggctggactgtgggtgaatgcaagaatacaggggacacagtccttccatctgcagacccaggaggcaccctgagcagagtgcaggggatgagaccttatactgcctgggacaacagaagcaaggctagccagcaggaatcagaagccctggacacacacaggacatggcttctacgtgaagagctgtcatgcacagagccctgagtccacagcaactaggacaccgggaggggaggaacagtactcagggaaggcttcctggaagaggcaggtagggtttggacaggttaacttgttaaagggagggaaagccacctcccaagtggaggaaccatggtgaggaacagatggcaggaagaaaatatgaagatatttcttgggaacttcacatagagcccacagttactttcatcatgaataaaataaccgtaatttattggacacttaccgtgagttaggttccaagctaggaacttggcatatattctcgtctttaaccctcttatcaattctaaagttcccagtttacagatacagtcatgcaagatctgaaattgtgatttaaaaaaaaaatctctgtatctctggcccctagcccagagcctggcacgtaatgggtgtccagtaatgtttgttgaatgaatgaatgaaatgataaaactagaggatttagtatcaacatctctccagcatccaggatgtccaaggccacctggcttgaggacacgggaatgactttaacttcccaccacctgcagtgctgcttttgagagatgctttatcatgaaataccatgagctgagcctggcatgcagtaggcactcaacaaatgtgggctgaatgattggcagccctgctcagtatgggggtaaaagtatgctgaattcagaactaggagacccatgttcagttgcccactgggtcgctgctgagcacttggctctgagtgggtacttaacctatttgaggctcctcctgcctctttagaccaggatgaattatgcccaattcatggtttgccatgagcattaaatgcargaacttgtgaagcgcctgtgagcctccaacattgcccccagggagagattatggtgattacggtcggtgggaagctgagtattatttcagtgccatgggacggtgcatacagcagcgtatgtgagtcagaggggcaggctgtgtggccggggtgcggtggggtgccagccacaccattccccactcttgatgattgattctgatcaacctgcatatttcatgcgctgcctccctgcctcaaataaataaatcagggcctcctctgagcagcaggacctgattggggcatctgcagggctcaggacttcaaaaggccaaagcagggatgctggagccccccagcagattctgctaatgtgacatttaggggccgggtgacccaggtaagcaacagccgcttgcgcagtgtgatgccccctaaatggcgaggacccttgtggggagaaggaagtgacttttacagcccctgtttccaccacccacggtcagaggaacacaggcagaagtgtggcccaggggattccctgttctgttttctgaatgtttctaagggccagcagtgcacctgcatttctgcaaagaaattcccttagagctagagccccaggaggcacttcctcagggtgtgccttggaattcctatataaactccaggcattttgctggccagggtctgcagctctggaagggacccgcctgcacttcacagaggctttcatctggggatgggtggacaatcctcctctttgtgcttcccacattcacgaggcacaggtggtccatgaagtgggcactcggcacaaactgtcacctctcaggaatcccatcaaggcacccccgtgtcagggaagagcatgggctatggaaaatgtccagggtttgagtctggcctctattcttattaccactggggccctaggcaaagccacaagctgtctgagcctccgtctccttgtctttaagtgggactgagaccacctactccacacactgttttagctaggcaagaaaatgtacataaaatagcactgatccagcacactatagaggctcggtcagtacccccagcccttcctacctgctccccaccattctcaagcctgctcttccctgggggccctatccctgccctcaaactcactgccccttgctccatccttctaaccacaacctttccctaaatctgcttcatccatgttcgctggtatcctcccagatgccagatcctcagaccctgctcaagggtcttctcccagcctctctgtggcatgtgacactgcagccagctccatggtgaaggtgtgcctttccttggcttctaagatgcccactccctcccaacaccctgctcctgcatcctggtcaccccttcccagtctctgctctgcccaccccaggggtcagggctcctccagagtctgcacttgatcctctcctcttttcacttggctcactttccctgggggtctcattcctgcctccaactccgattcccatcttccatgccgatgactcctgctcgccccccagccacacctctcccctcagctctagactcaagagcatctctgccttgatgctccacaggcatcccaggctcagcacatccaagatggaactcattattcttccccttgtatttgaagccctcctgggttctctgctcagggatgggaactgaaactcctcatccccaccagaaccttggatgaccttggtccccctcttcttcatctcccatttgatcactcagttgtcctgattttacctggaaaaaagaaaccttgcttaaatctgatccccatttccatttcttctgccaccactctgggccagtcctcatcatctttatccttgacgatgaccaaaacaatgaactaaacacaccaagaactgtaagaaggttgagagtaaatttgaatgcaccacttgggtttaaaaacacactgaacaagtgcaaggagccaagagcagtgggagattatgcttagtatgacacagcagagcaatgtggcttctgaaagatgcaaattcaacctaaggatgcatataatagcaatgtgaactccagaatgagggaagggatggtggcctctacttgctgctgaccaaatcatgccaaaagtgcactggtcagtccttggatctacactctacagaaagactgactttatggaatgtggcccaaggaggggctggggtgggggagcagggagattgaagtgctgttctgtaaagaggagttggggggtggtatcagcagactgacctgtctttgtcttcaagtatctgggcctatcctagggaagatggagcaaaaatggtctgtgtggttctagagggcagagccagttgagcagggggaatgttacagggaaacatttcagctcagtgaccaggaagaacttggtaccagacagagtacagttgtagggagcctgggctccccatctttgaggtgtgaagcaaaggatggacaaccagttgatgagacagagacaatgcaagagaatgttccagcctagatcaggttagaagttttgtgattctaaccagaagaggcattggagaaagggaagcctgccagaatatatccagggcctgtgaggggagcaagagcctggaataggagcacccagacacaaacccagatcccagtctaactggccactgtcttttgctccccacagacagcagggaggtgaaggtgggagagtacaacgctgtggccgacacactggagatcatcaatgacaccatcaggttccaaggtaaggcaggtgggcttctcagaggagggggcctgcccmgttgctcccaagcctggayattgtctaagggttagggacaagctcagcatcyttggcttcagggggtcaagggaacatcctcaacacatgcactcaatcgttgagcacagggcwccaatcacttgtatgggctccagcacctggcatgggtcactagagtttgtatgaagtgcacactgaggtgtttaaaccattggatggccaggagtaattctttttaaatgtagccctgctaaatttaggtctatcttctcctctggcaaagggtttgactgggttggaaataaggcctgtctatctgctgctcttcctagaagattatttcttctcctctgctagagaactcctcttcagcttctataaccagctcaaatgacacctcttctgtgcgatcttccttaattgccatccaactgagctaatgactcccttctctttgcttccagtctttcttctctgcctctcttatggccactgtcactttacattgatattactaggtgattcagctatgagcccctgactggatcctatttaactttaaattcctggcaccagccaaggtctgatgcatgttggagacttggtggtatttaatgacaaaatgaattgatcaagtggatggatggatgggtgggtgggctggtggatgagtggatggatggatggttgggtggatgagtgggtgtgtggatggatggatggatggaaggttgggctggtggatgagtggatggatggatggttgggtggatgagtgggtgtgtggatggatggatggatggatggatggttgggtggatgcctggatgggtgtgtgaatgggcagatggatggatagatggataggtatgtgggtgggtgggtgagtggatasatggacaggtagatgggtggacagatggatggctgggtagatggatagatgaattgatcaagtggatggatagatggatggatggatggatggatggatgggttggtggatgagtggatggatggatggttgggtggatgagtggatgagtggatggatggatggttgggtggatgagtgggtgtgtggatggatggatggatggatggatggatggatggatggatgggtggatgcatggatgggtgtgtgaatgggcggatggatggatagatggataggtgggtgggttgggtgggtgggtgagtggatagatggacaggtagatgggtggacagatggatggctgtgtagatggatggatgaattgatcaagtggatggatggatgaatgggtagtggatagatagatgtataggagggtgagtggatgagtagacagatggacagtggatggacggatggacaaacagacagtctagtcacttaatagcaatagagaaagctgccacatccatattgttactttgattccagtgggtcagcagaaattgggacagctggctttctgtgccaggagcttttaagttccttctttaaagcaagggcaccagagaaggctcttccgcaggccctttgattagactctgtcatgttcctatatttccactggacctgagggattcagccttgagaacattgcaaagcaaaactccagtcagcctctgagaaccagaatggtctccacactcaggtgagcctccctatcccaactgagggagctgtcaccagacatatcgtcaagtattacctcaagggtgacaccccagattcacacagcctgttgtaaccaccagagccctgatccccaagatcggcatgtctgctatcggactggggagatcagggtttactgaacaaggactctgggtttacgaattgaagaaaagattcaagcgccaaacaaataaaagacacaaaatacaacttacaggaaaaacacgaatttggtggggcagggaccagtagccaggacagtggctaaacaacagtcagagggtaccaggtcttcattggtgatgcccaggccctgcctttcagccccgggctctgcccccaggctgagagaacacaggaagccgctgtgccaggcatacttcctgcttctcagaccttccccactaccaagaccgtgaataatcagcctctgaacacagagcccaggcaggtcagggcagagcccaggccttctatccacacctggcctgggttcagctctcagccccgctcactcggacccctacactagcccccagtgaggcttctcacagctgtgctagccttccctcctcaatccattctgccctcagcagccaaagtgcccttgctgtcatgccaggcttaagatgccacctctgctcagagccccgcacgtccccactgctcagagcgaggggacctcactctgagctgtggccccaaggcctccatgaagggacccctcctcgcttctctgtctcctctctcagattccccccaactaaactgcttacagttcctcaactgtcctgaaacaccactgggccttggctcatgctgtgccttctgcccaggatgctctttccttctcatcttcctggccaacagccaactactctactcatccttcgagactcagctccttcgtcacctcctttctgtagcatttccttaccccgtcaggcaggactgcactctgctccctgctcgctctcaggcctcctgtctgatgttatcacatcacctggamcccagcgtcacgggcagcagtttgtgtagtagttagaccataagcttcagggttaggcagatctgagttcaaatcctgccacttactagctgtaagagccacttaacacctagaaaaccattgycccctctgtcaaatgataataatcttaactacccctgaggctgttgggtggatcaagtgggaaaatctctgtatcttgcttagcttgtcataggcattcaataaataggattgcttattagtgcttttttcttttttcctatggctagtgtgtaagttccctgaaggcagggacagtgtatttttcatctttgtatcattggtgctcagtctcaggcctgacagatgggagttgattattaattgtgattaatcatcattaatgatgaatgaatgagtgaatggcaatgaatggatgaataatgaatgaatggaccagatgaaaagygagaaagaaaactcaggacttctgctgttactaatactcatgataaaccaagcatttggtttccacaaagtcttaataccccttgtggagccatcattttgcaggaacagaagaaggagtaagaaggagacaactttctcttgtctattgtcaattttctggagttgtttctatacaataggccccaaacccagtagtgatcatatcacctgtgaaccaaacctcagtcttctttctcagtgtccatagaagggcttgtttccagccaggatctcacagatgccccagcactgttcttgcatttggtagccagaaggcacctgagccaggtgtttggggaaggatgatggacagaggtggaagaagcttccagatggtgagctttcaccatctggaagcaagaaatgatgttacctccatctccttgtgtctgctttagcccagacttttggcccttgatgccacttttcttataaatgttagtttacatggaattgcttaaggcttcacattaaccacatcagcaggttccttgatgttttcaaacctggaaactttcctaaatttcttacatggttcaaactcttttaatccactgaatgtttctcgctctctatttttttttttttttttttttttttttgtgagatggagtcttgctctgtcacccaggctggagtgcagtggcataatcttggctcactgcagcctccatctcctgggttcaagcgattttcctgcctcagtctcccgagtatctgggactacaggtgtgcaccagcacacccagctattttcgtattttcggtagagacggggtttccccatgttggccaggctggtctcgagctcctgacctcaagtgatccacccgccttggcctcccaaagtgctgggattacaggcatgagccaccacgctcagccaaagccactgaatatttctaaacacatttgaacttgctagcagtgttttaaacccagatgttcaggggagttctcactccctgctaccacatctgcccctttcctgcttgtctcctgggaagagaggcataactgggaccctggtggggctcccagattcccaggcttggctactttgtaacatccggctgattccacatacccctactggagagaaaagccctgaagtttcacaattccacagcagaaacctgacctaaaatagcagctaagaaagagggattcgcaggaagctgggggagtccctgaatccctcatcccaaaccagtctatgtctgctaaaactaaaacaggactgaaagatggatttgctctgaaaccctcagggttcccccgagttccttgtgctcttgaagaatgagcagcgcacctctgcagtcacatagagaaatggaatcccacagttccaggccagttctggcacagcagggagaggaaggtagcttctgcctcccacagttactcagagtcttgtggaaacagaaagccagatagagcttttaaaacacaatgacattgaagcagaaattctgcagccaaaacacctatgtgtcaccatggaaccaacaggcaaggtgtccatcctgttgaggagggatcatttattgtgtatgtttaggagcagagatcttgaggccaaagccaagttcttcatccccgaaggcacccacgggtacccactcacatcacccagccctgtgcttccaggccgttgttgccttgggggataaatggtgatggtttttcaatagtgtaattagaccaaatcaaattctagtcttctaatggctattaaatgcatcacaaatcctttattgattctatttagagaaagaaatacagtcctagctcaggctccctgttgagcagactggccaaccaccggatctggctcacccggtagatagatgtgccttgtgtagagtttgtgcrcagggcctggctggatgtcagggacactaaggcaaaggtgttctcggggaatgacttgcattgggtcccactgawgtcttctcttgatcctctaggatccgaaccaccaaaagacaagaccatcatcctggagcagctgcggaagatctccctacctctctacagcatcctctctgccctcaccatcctcgggatgatcatggccagtgcttttctcttcttcaacatcaagaaccggaatcagaagtaagccaccctggtcctcctctgtgatatcactttctaaattgacaagcctatggacacagtataggagtgccacatgacagattccccaggracacagaagtctgcagggcagagtttcccaaagtgttcctccgttgctaggatgttgtaggtgttacatgcatgtgagtatgtttgtgtgcgtgcacgcacacacacacacacacacacacacacacacacacacacacagaggccaggctgctggttgcacaggagtttagtcaaataagtttgaggaagttaaataaaatcgaagagtccaagtccacgggccttctcagagctttggatatactcctgtactttgtggaggtccaggaggagagatatagaagacagaataccccaaacttctttgcccctatcccctagcatcgctgggaatcaccactgaagggggtcacaaagtccagtgaaatggactcccattggtacagttcattacggccaggaagccctcccttccatcatcccgtatgaccctccggataactcctcatttcacagagaaaagccctgaagttcagcgacagagtgctgctgtccactcgtggcagactgtcttcttggtttcttgtcttaatttcttttccccaccacgtgcccttaattctccagaggagagaggctgactgagttattctggtcagtcatgggtagaacaggccgccactccaggcggtggtttttaccaagtgcattttgcttctttggtgtccatagcaaatccctgaacccagccccaagcctttttgtggaataagcaggggtgcagagcatgggccgtcatggggacagccacagtgaccacctacatggtgccatggctctgccatggtgcccagaagccacattgcatgaactcgtgggctgtcgggaacaagtctgattctgaagaaaacagtttttttggtttttgagatttttaaatttctccctgcttgcaaagaaggaatttggaggctctagacttttgtgtgtgtgcttggttttttaattaattaattaattattttaattaatttattttattttattttacttttttaagagacagtctcactatgctgcctaggcttttctcaaactcctggactcaagcgatcctcctgcctcagcctcccaagttgctggaattagaggcatgagccactgtgtccggggttattttgttgtttgtttggctttttttgatagcagttgcttaggtcaaacctatttcctgaaaaacagaaaagagttttcttctcctgttattttattttacttacaacaaatagcacatatactgccacaaaaaaaagtgaggcaacttttgtccactccatacaaaccttaaatgctcaacatacctcttagcacttggcacaggcctgggcacataatcagctctcaaagttagattgacagcccagatgcctcgagaagtcccatcaggacagcaagttgccccatcataagactaaactcattgaattccttaactaccccctcttggcctcctgggggaaagttaccattactcttttcaagaggctggcatccaggtgaagttttttgttttgttttgtcttgttttttaactggcttggctatttaaaaatctgcagaaagatagaaaaaaaatattgctatggttcccaatccctccccctacttctgtcttcctaaatccatcctataaggcccacctcctctgggaagcctgccccaacccccaggctctcccctcccctgactgctgtagtaataagaatkgaggcacctaagtagttcacggtttacaaaaggacctccaaggacccagcgtcatctcagcttcatgtgtgtccaaggcaacaggatcagttatacaggtgaggaaattcagccaggctaagtgayttgtcaaggtgtcacttttatggagtggccgagtctaagccctggaccccctgctcccaacttgaaagccggggtgcagttcacagaggaagagcagcaggcttcttatttccctctccctttgacgtattgcatgtttaaaatgtgaagggttaacagaactggagaatgcaaaggaaaatgttggggaacaattggctgtaattacagtctgcaaaagagcccctcaaccacagggcgcctaaaacctgaagcccttctgagctgattgtgctgggggggccaggcacctacaagcccactgatgaccctggcttgctgggcagctggaggccaccacagggttccgggaggaaatgacagagaaggatgcagcgtctggaagtataaagaatgctccctgctccccactgcagcctagtgaagacaggggtagtgggtgggttgcggactctggtgtctccctctgtcacccggtgactgggagaggtattcctgcccacatgtgtggctgtctttgtgcacggaacagtgtgagctttcctaagcaaccctgagactcacagttaggcctccttgacatggtctactcaaggctggggagtgtggtatgggactttctcctcactgtggggaacgtggctgaagttacatgtcacattctctagatttgacatgagttcttagttccagccaaaaaaaaaaaaaaaaacctgttgacttaatgcttttgtttaaactgaaaattaatggatgaagaagctgatgtgacaagctgtcccttgggaagtaataggtgaacttgacaaaggaggcagggaaatcaacaattagaaatatatagttgtctgaggtcttttagtgaaggacaaacagtaggtggggaggagggtagaggaaaccagagcttttcattatttctctgtaaggggaaggttccagagtgagcacctgggtgttggggaaaatctgactagaaatgtgggacttcctgctgatgtgtcccctgaggccccatggcrtatttctgtttctctctctcccctctagcctgagcaacaatatatatctagcaggcgtttagaaaatacctgttgaaggaataactaaattaaccattctgttaaatctattgtctctttctcttgtcaggctcataaagatgtcgagtccatacatgaacaaccttatcatccttggagggatgctytcctatgcttccatatttctctttggccttgatggatcctttgtctctgaaaagacctttgaaacactttgcaccgtaagtcattctgcataagccagtggtatatgatagaaagtttccttggtgacctcagtyatcgaaaacacagatgcaaacccagaaatacatgaaaatacatgaacaggsagggaacaacccatttagtagttttcaactcaacagggaagaacggtgttactgtcaggccatcactgggtataaataccacctacaaagttaagataatggacttccagcccgggcaacatggtgaaaccctgtctctacaaaaaatacaaaaaaaaattagccaggcatgctggtgtacacctgtagtcccatcttctcaggaggctgaggagggaggattgcttgagcccaaagatcaaggttgcagtgagttgtgatcgcgtcactgtgccccagcctgggaaacagagaaagaccctgtctcggaaataaagatactggacttaccaggccactgttagaagagagcccactgagaattgacagagtaacatagaaaaggaggggaaaaatattatcttccagaaaagcatcagcgccaagggtcagagtcagggtcaggatcgtttaagaaggaacagatcctcccatctacctcaaaaaccatcaaagaatatgacgatagatctttgtatgtctgactgagttatatggtaaaagctataattgttattttctatttaagtggtgttttcttcaacggttttttccttattgttcccctaaggagcatttttagacattttttcctaatgattcctcttatgaaagtttaataccagaaatgtaatgtatatctgtttgtgtactttatatatatatctatggtttatacgtaaaaaagagtaatgtttcttcacattcaagaaccaacagttgcccccaagggggctgtatcatccctattgagatatatatatatttaatgaagtccaaagcagtgtaactaatttactatacattagaaagattatttttaaagttaattaacatgttaaaaagtttaatgcctaaagaaatgccttttatttttttttgttttttgggtttttttggagacagagtttcactcttgttgcccaggctggagtgcaatggtatgatctcagctcactgcaacctccgcctcctgggttcaagtgattctcctgcctcagcctcctgagtagctgggactacaggcatgcaccaccatgcccagctaattttatatttttagtagagacggggtttctccatgttggtcaggatggtctcgaactcccgacctcaggtgatctgcctgcctcggcctccctagttatttttttaaagggggttatgtattagcaatcacttaatagttttatggaactaactctcagttgaaaatatcatgaacttactttttaagaataaagtaatcagttgggatgtatttctggacattgactatgatctgtccaaatggggttagccagctgggtctctttagagtcccacatgcagtaattcatccagtcccctgcctggaagaccagagctagaggggatggtcaaaagatcggtgctgagtggattcatccaaaagccactcctttgttggtgctgttttctttcaagacgttgagagcactgtgggcccttttttgcaaagcagccttttttagactgcatttgttgctcacaagcctcagtgttgcccactgctggatgatgagggctgaaggctagcagtgagggatgcttaaacgaagcaccctttaaatgtgctgcaagtccccactcacaccccagattttgaggactgagtccaggccagtccctctgctctgggacagcacatggaaagaagggaagccccccaagatcttacagtctaggggattttgctcccaggatttctgcgaatgattaaactggactgactgttacacatcatcgagaaattgttcctgttaccagtaacttcactgtgagctgtctagccagagagaggtctacagatacatttactttatcctcaattgggcagtgccttgagaagtgtgtggtcgagtccccagtaactgagggggtagtgaggtcactggtgtgttcaggcccctctcctctcctggagggacctgcatgactgtcaaaccccagtgctccagggtcacttggttcactcttcccactcaagagtttttcactccaagcctggcactggctcattcccaccaaaagatcaaaagagtatggccttctggcatgagactaattcccattattctgcccgtctgggagtgaagaaggtgaatacaaaagatgcaagtccctggcttcactgtgcctgcagtcagcttccaaagaagctgagcttctcaaaagtccttgtgggtgtggttcagtggggttgttctctaaagagtatggcctcctggggcaaggtgcagtggctcacacctataatcccagcactttgagaggctgaggcaggcagatcacccgaggtcaggagttcaagaccagcctgaccaacatggagaaaccccatctctactaaaaatacaaaattagccgggcatggaggcgcatgcctgtaatcccagctactcaggaggctgagggcaggagaatcgcttgaacctgggaggcaggggttacagtgagccgagatcacgccatggcaccccagcctgggccacaggagtgaaactccatctcaaaaaaaagaaaaaaacaagggtggccttctggcatgagaatgataaccaaagcgcatggaagtctcgctagttttagtggaagtgtgaaggccactgagtctctgatattcctacatcagcatgacttttgtgccctgagatgcctaacaatttcatgggcatacaatttatttatggtcagctttcctgggcagtggtgaggcctgaataaaaggttgctcctgagggaccctgatgaagttaaacgaggaaagtgaggatttctctcttccatctgtgcttaggcttcctccccaagttttaggacacagtgatgattacagtaatggaaatggtactggggccgggtgcagtggctcatgcttataatcccagcactttgggaggccgaggcgggtagatcacctggagccaggagttcaagaccaacctggccaacatggcaaaccccatctctacttaaaaatacaaaaaattagctgggcgaggtggcgggcgcctgtagtcccagctactcaggaggctgaggcaggagaatggcgtgaacctgggaggcggagcttgcagtgagccgagatcgtgccactgcactcctgcctgggcgacagagcgagactcggtctcaaaaaaaaagatactgggggcaagtttggcaactccagtttctcagtggcatccctgagaggcaaggggcttgccttgttccccaggttgagaaccrgtggagcaaaaccctaccctcattctgccatggccccagtccttcccgggggccactctgcccatctcctcatcacttgctgttggacacctgggaatgcctcaggtgtcctgaggcattcaatcttcactgcagagattcctgcagcagacatgaagggctgcccagcctttagaaactctctccttcccagaaagaagttcctgacatctcgccttgttcacaagccaaaggctatgaaagcacaggtgctttctcaagtttgacctgaattcaacaaccacagggtgacgcaggctagggagcaaaaacagggacatcccccacacccagggcttttctttttaatgaagcctgatgttctattctgggagtcacgctcatttgtgtgaggggaaggttgtcctgggaagccggggaaggctgatatgaataaatcataaagcgctttacaaatcagcatcggctctgaaaatgagggcccgaaaagatattagggcccagttcttgctgcccctgagaattaatttatttgcagtcaaggctgttttagaagctctacaaaggggagtccacatgcatgactgtggggaaaaggcatagattatctaccccggactgaatcgggtcagcacagaggtgtacatgggttagggctggggccatttatttactaattctcaatattgcccaggaagaggaagtgaaagctcttgaatttagggcctaagtaccagtgcctgatgggtacaatttgggttgtattccacctgctattccagggtgggcagctccttaatttcacttggtgccatggattctgtccttcggacctagaaggctgctcccagcaaactcccaccgagtggggagctgcaaggagaagcaggcccctatggtgtagtgatcacggatcttccaacaacagcctgcattcgactgccacctcctccacttactagctcctgactgcagcaagtgacttaacctcagttttctcatctgtaaaatgagcataacagttttccctctgcaggattgcagtgtgggttaaacaagacgattcagacaagccgcctggaactcagggagagtgctgcatggagggatgtaggaggagggataggcatcacagcttgtcaccttgcatcctcgtcacagtgtaatttcctggtgtcccacactgggttctgtaaatcttaaaggacaggggacaaggtagaccatgagaccaggttcagacatggcgcagccgaagtcacagttctgtctgctctgctgccatatacatgccgcttttttctcccttttagttttcaaaatagcagcttaacacagtgagaaaccatgaataccccctcaggcagaaacctatgacagtcacaagattaggcctctctaggggctacacctctgctcggacgagggtgggtgcgtgtgtgagtgcgtgcacacagattcacccacacacagtgctactcctagggaygcagtttctcttagttcccatcccccactccctctgacyctttccagaatcttcccagactgtcagtgccggtttctccaagtcttgagaacagctccagctataccccgtgctgtctccctggacactgtgcgggtagtggagtcaccatagcaacgtggcccctgtggacgtggagctgtctgcaaggacagtgctgggcgtggccagggccccagtgccarggggaagggatggaccccggcagctgagctgacccggctctgggatcccagcccctgtctgcccagacaaggagtccagcaggtggggatgagaaaaagcacttgccttccttgtggatctgaggcagaaaccccagctcgagcgggggaggagtaagaaggggctttgcagacaggatgaggaggctccaggcggaccttagatcccagcgtgggcctcacgcagcttcctgggctctcagaagcattcctgggcgtggggtagtaacagcttcctgttaactcccgagcctgtgccctcagcctctgcgagtcaccaaggccagctttcagccaggggcagcctttcgttcacaaccacctgacaaggccaagttcactgtccccacctgacggagcagaaaacggaagccctgtcacacactgctaggcagcagggaagaagtttaaaactagctctgttggaccacaaagatgattgagatgtttcattagaaagcaagactattctgattttttattagctggcttataccagaaaaaaaaaaaaagtcaactaagttcttagggatctggtaaccacctatcccagccaatattaccaaaatttttgtctcagatttttttaaattaagatataatccacataccataaattttgcccttttaatgtgtacaattcagtggcttttgtttaccctatttaacatctctgaaccttagtttcctcttctgtaaaatggggatgataataatagggttgtgaggattaaatgagatcatgtatgtaaagcatctagtgcctgtcacacagtaaggcttcatacatcttagctgttatcattatgtatgaacgaatgatgggactatgtctggataattgtgttcacctctggataccattaagagagacactgataaagcagagtaaacttgggataaagaggctgggaggccaggtgcggtggctcatgcctgtaatcccagcactttgggaagctgaggcgggtggatcacctaaggtcaggagttcgaggccaacctggccaacatagtaaaatcccatctctactaaaaatacaaagattagccaggcrtggtggcagacgcctatagtcccagctactcaggaggctgaggcaggagaatcacttgaacctgggaagcagaggttgcagtgagccaagatcgtgccactgtactctagcctgggtgacagagggagaccctgtctcaaaaaaagataaaaaagaagaggctgggaaaaccggttgatgctggccagcttggtgtaggtacccatggcaacttctggccttctgtggccttgctctaccaaaactggggcgggaacagacttgggtcctgcctaagtcaaagccaagctggtggttgcctctgccaccttgagtgctgaaaggggctttggggcaggcagcaagggaggtaagaatgacacagacgggacctctgaggatgctgcggccatgtagtggttggaatctggcctaagaagccagtttggcccagggctgccctgagggacgctcagaagagcgtgactcagctttagctcccagctgcctctacttgctgaccaccccaactcttttatctacttttctacttaaaaaaagtatgtatattataagtgtggcactcagtgaattttcacaaactgaactcaactgtgaatccaggatccatatcaagaagcaggaccttatcagcatcccagaggccctccctgtctccttctggttcctatctgccccaaccctcctccccttgccaaagggtggcccccatcccagctcctgcatgcacagacagtgctactcagtgtgcactgagccacctgggggtctggatggaatgcagcgggtctagaagggggcctctgcattcctgacacactctcaggggatgctgatgccacatccccagaccgcacttggaagagcagggataagattagtacctgatgctttatttttgtgtttgtctcttggagactgattgtgtaagataaatgggagcaccagaagcctggtctcctggggcccagctgtgggagggaaggagctcctgggctggaagacactggattgtggcccccaccctcgaacctcgggaagcagggcggttccatcacagctggcagggtggggttcgagtcccgaagcaccccttcggcctcttcactctgctcagatggatggcagctaggcaggggkggggcaggggaggcccagacactggactggggagtgtgatgccctcttcctgccctcctagaggtactgggattttctaactctaactagaaaggtaaaggctgcctaggaacacccacttggcctcccagtaaattcaagtctggtaggaattaatgaaacatttttagttaaaaggccataaatctgtggttttgttgttgttgttgcatggggttttctttttgaggcagttgagaagtaaaacaatgtaataatgtgggtttggggctgtttctgcaggtggctgtcatggctggccatggtaacatgctttgtgatttcagaaggcagcaggaaggctgggctaggagatacccacagggtttggtggtggccttgcctggcaggtccagaccagctcaaggagagggtcacagggactggctgtcacagggcctgattgggccaactggagtcctggatggggtacagaygcccgcttgatgacagtggcctccccacccccaactcccttccagaggagggggctgagtggggaaccagggactccccagactcctgagccaataagcagatgatggcctcccttccagacaccccacatgtgggccactccaacccctggctctgctcagcactcttgttcccacaattcattcattcatatgataacattcccaggcacctgctaggcacagagcatggtcctcgaggagctggcagtgtagattgaaaacctaagtaaacaaacagttcccatttactatgttgtgtacactggcagagacaggcctaggggagtgggtaaggcccagaagcaagggacaaatcagggaagacttaaaataagggacccctctgagtgagctccagttatttctggaagtcctaaatgatacaccatacttgcccacagaattctcaacagctgcaatcacatggtgtggccactcagtccttcctctctggccctgacgcccacttgtccacgtcttctgtccacagagctgtatgaaggcacacagcagccccctccccaccacaccccaccccctcctgccactacccatctgagaatgctgcgtttccaaaaagctccccaacctccagtcctgaggcaccttctggggttgtgggggaacaggaagaaaggcctcttgctcattctgcattgttctgtggcctgagccaaggctgccaagggcagttgtgcactttctgcactacacaagggtgttggcttcaggggcaggagctgaatttcggcctgtgatcgggtctttgagccaagttcttggagtttgttggcttcaagggccttgaggagtggagtccttcagaaagggcccagacggggtgcctttcagaaatttctcctcccagaggagaaacctctctctgatttgccccaaggcttctaagatggcccctaggccctgactcgggttccaaagtactcctgtgggtcctgagtcacctttgccccctgcaccgttcccccagaaaggctctgctgtactctaagctccagagaagattttctrtacaggtcttacccagaagaccctgagcaagacggggtcttctggggctgtttctagaggctgctcttcagagtcttataacttgaggatttatctgtcgcccttgccctagaagacaagaygggccctggagacctcaggcctctcagcttccccacctcatacctcacagtgctctggggcttgctttggggcgctctgggagtttcttccctccttctcactattgagcacctaggatgagcagtcagaatgaagtaaaaggcccttgagagaaccttttggacagcaggaaagtgacttgcccctgtgtccagccagccaccagggcttgctcttccatctgacttgctggcctgaagcccacatgaatctgtggcaacaaggagacccggagcacagcagtcccatgcgtcatctgtcagaacaggcctgccagcagaggttgtatgtccattttcatgttgatccccagaagggcagtgaaagcccttcaccctcccaggcatgcttcatgaaatcaatggagcaarcggctgagcagaattgttctgggcatagatttttccttccatttggagacttgctctcatttctttttcctttttcatagctgggactgagatgggcactacctgcctaaagtttgtcttcccccatggatggattatgttcaaggcagttcgcagagggggctgagtacctgatggctaaggggagaaaaagaaagatgttaaatcagaaaaataaacacacgtaagactttaggagaaaaagtgaagtagctatttggtgttgacgaaccagtagagacttgtattggtggtaacatattggaaamcagaatcattagaacccttcagatgaaaccttctcgtttacttggcatcatagagccacatagaagggaggcacctgggatgtcattaaatgaaacctccctcagtgcaggaaatgcccctgsagcattctgatggagggggagaagggggggagtcttccaagctttgcttgaatatgtggagtgatggggagctcactacctgtcagacagcatgtggaaggggcagctgaggccatgaactcagcctcttttgctatcaaatgctccagttctctctgtgrtcttcctttaatttgcttgctcaggctcaacttgcacatctgtggtgacaaakagttcatgacctcctaaactggcccatccagtctgattgtctcctcttggctccagagatttaaaggtgggcaaagcaggccctgcctcccagtagcttcatctagtgggagaggcagacaggtaatcagatagatgtcatctctgtgtgaccagcagagcagaaacatgcttgaaggcagaagtcatgaggaggaagtagtcatgacctccctgcaaggtctcagtgggcttctcagaggaagtggctcacaagtttggatttcagaggatgcatgagaagttgtraagaacaaggaatggcattttgggtggaggaaacagcgcgtgtcagacccggcagcatgagccagtgtgatgtgaggggaaagactgagcagggcaggatggyttgagaaatatcagaagaggtaaggtagagggggctgcaccctgcctgctaagaatttggagtttaacctgagggctctgtggggcagcgatgggtttaaatcccagaaacttaagctggagtaacacttaatatggggactcactgtggagccctggcagtaggtgtctggtgattgtatgcaggaatgctcccagagacaaggtggttggtcagttctctacaccagacagcaatgggatgcagcattgagagtctccaagacaacccccaagttcaatgattcactaggactctcagggctcagcacacagtcatactcgcagctatgacttattacactgaaagaatacacagcaatatcagcaaaggaaaaggcacgtggggaggcaaagtccaggggaaaccaggtggcagcttctgatagccctatcacagcggaggagcacaggacacgcttaagtcccccagcaatgagtagcgaccacatgtgtgaaatgctgcctagggaagcacattagagatgacacgcccagggtttttagtcggaggatggatatgtcgacaccgtctgcctactaygtaacaaaattccagactcccagaaggaaggcagtgttcagcataaaccacgttgtttgcacaaccagttcaggcacagtgagctgctcttatcattgaggggatggtgggaactgtccagaatccaagctctcagataccagccaaggaccaaccttcaaatcagacctttctaaagataacagtctcaggcctgctatgttaactcttttctgcccaggcatcctcagctattcttcgcttttagtttatggcaacatattgcagtttccagatgccagattaaatttatattattgaattttaactaacttgactaattatatgattgagtgaatttagccctcacaaaatagacaagtggcctggaaatgattgtttcaaagaaaacctaagtcaaagcaaatattaagaatgcttgcacaccaaggccaggtgcagtggctcttgcctgtactcccaacattttgagaggccgaggcaggaggatcacttgagttcaggggttcaagaccagcctgggcaatatagcaagatttcgtctctactaaaaatcaaaaaaattagctgggcatggtggtgcatgcctgcagtcccagatactcaggagactgaggtgggaggattgtttgagctctggagatggaggctgaaatgagctgtgattgtaccactgtactccagcctgagggacagagcaagatctcatctcaaaaaaaaaaaaaaaaaaaaaaaaggaatgctttgcacactggagtgacacatctcctcaaaatagatctttgtcagccacaggatgaggtaaaaatgatgatattacttcatctttgtcctttttaaaatgcccatggtctgtatatggtcatttgtaaaattaaacatgttcaagagaatgttatcaaaaatgctgtagaccattggtcttaacagtcatgtcactaaattagctttacaagtgtgctgaggtccctggagggtgttacaggttggtcagctaccccctctgggtgtgtcctggtcctttgacatccggctcctaggtgtagatgaacctgatttgagttgaggagactccatctgaggaggaggcagcagcaggatgtcggggagagaggcctggaccgggtcaaagcatcgagttccaggcttagctctggagctgtgtggcatggttaagggaactatcttgaatgcgctgggcctcagtttcttcacctgttaagggagttcctcacttaactgatacctccaaaaaatcaccctggtgtctgttattgttgttgttatttctttttattgttgtatactttgcctctgtcctaataatacttgttgaagatgaacaaatgaacaaacaaacgaatgagtgaatgaatgagatgaactgtcaagtcccatgcatctctgacagatgacaaatgtattatctgttcattgaatatgctcaggtctaaattctctatcattggctctttccccctccctgttttgtatatttttctcacatccttttatgatcatctgggtaataatgtggccattctacattctttctaaagcactgtggttcatttttacccatctgatttctccttgtttgtgaaattaaaaaaaaagaaaaagaaaaagaaaaagaaaatagaaggctaagcacccacctgtaccctcacagcattcatggttcacaggcctgtgtttctgaacaagcgctgtgatactgttgtccttcccttgatttagtgggtcagccttgcaatctaaaaatagttcctatttttacaaataaaattgaaaygcaaaatgttctgtctctgaaaacctggagagtcaagttgccggaaaggcaggagcagaatgaatctgtaaggggaatgggctgggaacatttcttggaaacttcctacatgtgttggtggcagccagccctgaactagaaggggcctggggaagccaagcaaagctactgtgctcagttcctctggatgcagagggcctgagctgtctgctgcagcctggctgcctctctttttcccctaccacatccaactttctgccttgtgttcagccaaggcaggttggaacctttcaaaggaaactaagctcaacagagctgagggagagcaaagacccaagctcagagctgcaactcatggggcacgtggcttttctgtcccagtgagtgggaggccccagaactcagtggtgcacagcccagggctggaccatgatgtggggcccacctggagatgtgcacgtctcctgggtattagagggtgtccagtctaaatggtgagggttggggggtctgggagtgatacagtacaggtgaaggtgggcgtcctggaggcccctaagacctaacaggtggtggccagcctgttccagccttcagggatccaagttgtaggctcctgtcagggccggctgttcccattagccaccaacccagggctaggcgtcagggcacaccttggtcctggggaataggtgagagccagacagggcctcagtcctgagcagggaccaaggtctaagtgtgggmtcagtggccagtctggcccatgctgactaactgaccttctgaggtgacactggacagtagtagccacatggcctgaccatgtggggagagggctgggcagcaggaagaaggaagggaggaggggaagtgaaggccagagggctggaccatcaccttttggtggtatctcagcatctcagcagtcctgggggccctctgtggctctccctctgtctggctctctctaggcccatctaaggcatggtttgaatattgcactcctgtgtgcctagtgacctgggtctggtaagtggctgatagaactaaatgcctattgaatggaaatttgattgaaagatgccaatgaaactcaactatatgcagaggggagtatttgtccccatcataaagagtcccyttgcagggtggactcatacctgatgaagtctgtcyacctaaggaaggtcaatgcctctgttttctcatggcctctaggtcaggacctggattctcaccgtgggctacacgaccgcttttggggccatgtttgcaaagacctggagagtccacgccatcttcaaaaatgtgaaaatgaagaagaaggtaatcactctccttctgtttcagggtattagtagtgttcacccagcatttatctagcaagtatatactatattccaggcactgagctatttgctggggatccaagctaaacacaatccctacctcctgccaccttcaccctactggggaaatcggacagttaacaaagcatttrtaatacacagttatcagggctggctggggacatgtggggggtgctggggtacraaacactcaagggaggcttcatggaggaagtgccacctatgctggggcctggagggtgagtgggagttggctgagccaagggcatagggatgctggggaccttgtcaaaggaaccatccgtggcagcctggggatgggargagggtggtcaggggccgagagaggcttggtgtggctggggcatagggcttgtggggacagggtacaggaagaggctggaagggaagacaggagccacattaaggaatctgcactttaacttatgggcaatagggagcccttaaaagagaggagtgaaacagggctggtacctgatttaatgattccattttcaaagaggcccctgtaggacaggagctcagccttcacaccgtggaccrcattcgccacccgtgcggtttggtatagatatgatgttgccagaccttgactcttagtcatagagaaactttatccaccwctgtcctctttaactcttgcagtggtactggagctcccctttcttctggataaaatttgtgaaagtcttgtgatcttgaaggtcctctggttagtaactattataatatgtagagtctattgttatattcaaaactkcaaacagcattgattggcacaacttctccctctcccagctcaggcctgcagcaggccggccacctgccttgggaaaaggagtataggctggccgcttctgtctttggccagcctgcattctttccccatcatcccatccacccaggtgtccaacccctccagagttggaattaggagtggtggaagaggcaggaaataccttacttgctcagagctggcattgggcttactgggcctggcaaggattgcagtggcccctttagactcctggggcgcttttctgagtccctcattactaggactttctctcctgccgtsctcttgatgcaggtgaaatgctcccccaattggctatttgtggcttcttcctctgctcctgagcacccttcagttctccaccctggggtcacctcacccctccagctagtcctggacagggycacacaaactctccctcacccatggcccacatctggggcrcagaaagcattccttcatcctttgcacctacaaactcaaggactgaaggttgatgtcactgtagtagctgcctctcttttgttccatcctcagagcagctggccagtccatcatccacctttaggtttctcaagcaggagtcggacaccagtccacagggtcccccaggctgcaaagactcctatcaagccacccagtgatctccttttcactggaaaccaaggcctctcccttgatttgaggtcatggaggaagcgttccctcccagtccacccatttctctcaccagggtaccatgacacctcttaccaaaaatcttcttctcaattcaattccccacccaccacaccctagccccctgcacacactcttcaaatcctgatgtgggcatcacctgtttaccaacacctcctctgcagatcctcactgtgggctcatcccagtggaacatggagcctgttgttctggtttttcatccaagcctgcattttgctccctggctacctggcaccagtggcagacagcaacccagcccgagcagtgaggccaacaggctaaacagaagcctggagttctaggctctgctccactgctgatctgccgtgttagacaaagctcttagtctttcaggacttctgtgtcctcatctgtagaatgtggacacattaacatagtattgtccccttagctgtgattctgtgggctcctgcctggtgccctggtgatacctctcactcctcaggccccccacccacctcttcactgccaaggttcttcttcaggactgcagccccctgtcctctccagatgaggtggaggtatattctgttctctgccccctgccccctgccccacacccgaaccaccttaggaaatccacaggctgcatttagagtggggaaggggccctgctctgccaccctgtccctgtgctcgcatggaggggccgtctctgggccccggcagcatttatgacaactctccgtaagatgagaggcctggccaccccagtgttcctcagctgtggctgtggactgcaatcccagaggaccttttgaaaactactggaagtcgcccaggccagttgaaatgagggctttggggctggagctgagcatcagtagtttttcagctttccctggtgatgttaatatactgccaaagttggggacctgtggtctaggtcagggcttctgagtgcggctgccctgcaagctgttagaaatgcaagttcctgggccccgccctgaccctaatgaacgggaatccttgggaggagcccaggagcctgtgttttccccatccctggccaaagcaagccaaggctggagagccactggcctaggtggcttctggggcccctcctgctctgcggctctggtttaagagctgttctgctcttgaaccaggatgacaactccatcctggtttggaagaagcacagtattggttcctttgtgctaatatgtgattcatccctatggtcatctgtgataagaaacctgcctttatgctctctaacatgactgccaagcaagaacacatcaaccgtctggccacaatcgacaaaacatattgggaaaacggcaggagttcagttgtctagaagctccctgtggggcagtgatatggtgtggtcaccagaggccatgggcttttgctcacttcctcctgcactgcctgagctaggggaaactcggtccccgccaagggtctgggccaactctgagagctcaggcttgcagtgggtccaggcatccagggaggaggcttatctgagaaacaagcctcccacacacacacttttttaaccttttttaactttttaaagtttctttactttttttttttttttttactttttaaaactttttttctacttttgtttttaagggtaatgatgtcagagacagtggggattaaaacagtcccttaacgggtatgaggttagaggactagaaggtgacagaggtggacatcagaggatggtaattgtgtcaccaggcatctagaggaagatgattgtgacggtgaggagggcctcaggaccagcgggggaaatgacatcaaggatggtgagggtgatgtcagggacagaaagggcaatgacggcgataaacttcatgcacagaggggatcagggccacctctattgagttaatggcactgaactctccacttaaaaakggttaaaatggtaaagttgatgtgcattttaccacaataaaaacaaaactgtaacaataaaaaccaacttggttatgtaaaaaactggaactgtgaagaagagcccatttttgaactacgcctgtcacaaccctttcaaaacaatctggttccctgattgagtgtgtggtttgggtaagatataaatttctcttctctaccttaccctcctgtaatttggttggtaaataatacttaaccacagcaccgcaaaccggctcctggaatcactagaaaacccagagtaaccccaaagagtttctcatactggaataatgtgctcatccagccttcatcattttcacaacaaaattagtaccaaatcttgtactgaaagcctttggcagttcatgttgttcgtttgtattgtgcaaccatcatcaccatccatctccaaaccttttcatcttcccaaactgaaactccatacccattcaacactaactccctcttctcccttcctctccccacagccatgcccaccacgattctcctttctatgaatttgactcctctaggaacctcatataagttaaaccatacaatatttgtcctttggtgactgacttgttttgtttcttttaaagaagtttggactttttttagtggcccccttatttttttttttttttttactgacatatatactagatttatataaatttgcaaatgcaatcatttgctttttttcaatgcagttttttatccttttcttctttgcatagctcccacccctcctccctcatccatgatggcttgccctccccaaacatacatacacaaacttcaccccatatgccctatatgtccacatttttgaaagcattaaagcaaaagaaggctattaaaggctattaacacgtgtgacttaatgcttccaaatttcatatttttacagcatgttactttttttctaaagaccaattgtaaaatctttttaaattgaggagttttattacagtctttattttgcctcatactaggaccaaatggaagtgttgaaacaagagtagaaatttagagatgacaccttctgttctgggggcagatgctttttgaggacaatggaagttcactacaaatatgactgggttctgttgtagacaataacatgagtgggaaaagcacctgaggataaaccctcagactttcatctgggctcaacttaaggaaaatgctgagggcttttagcagctgtcatgaagcatctgccatctaaagacgacaggagagctcagccccaggggcaccatccatgctgtattcctcctgaatggtgttccctgaagaaatgagttrgccctagtggaaggccagtctgaataggtcagaaaatctcaagttttttgaaaaaatraagaaatgcccttttctcttaaccaagcatcagccaagtttttctgcaaagagccagagagtcaataggtaagactttgcaggctcttctgtcatggttgcagctactcaactttgctttcatagaataaaagcaaccatagacaaatatgcacatgacattcatttaaatgagtatggtaaaggtgtaaatttctcttctctaccttaccctccttgtaattgagggtacgctcatttaaacgagcarggctacgttcccatwaaactttatttgcaaaaatagatggtgggccaagtcagtagtttgctaatccctgctctaaacaacccagaagtcacatttagtaaaaatcgctggatctgttgaacagttattgtaagccaggctctggtaawctagtgtgggatgtgcaaatattatccccatgttctagatgaggaaactggttcagagtgggaagggaattacccaagatcacacaactagttagttcatttcaaacttagatctgattccagaaccaggtgcttaatcattactgggtgcctttgctctcatctgccactaagtacctcctacccacagagagaggactgcatgtgatagcatcagtgagtactgacgtaacccagagagaagttcaggcagcatttaagagaaggaaggaagtcaaagaatctaagaatagggagatggccttgcctaatgcaaggggtctctggtgctcagatcagtgcttcttttttttctttccttccttctgttttcattatttaagattattttaaatcacctctacttgacattgtattttgtattcccacgggtgtacttgtataattttcactactagtcttccccacaaacatgcatgtttcttagggcagaatgtttgttttgtccactgttgcatcctcagtgcctagaacagaacctgactcagggtaggcactcaataaatatttctacaattaataaataaaaagtgattcataactacttagcctaaacccattcagtcacaaacagtggctacatgccagggtttgtgaatggtgccaaaaggaaaataaccatttcctctcctctgattctcagcatcttcccaccacgcacccatccacacatgatgattagtcttgtgtctagtagagcttaggtgcagtatcacatttggcccctagatgtcactgtgtcttacacataaacacagaatcactaattgtcaaaacccaggtaatggtagccagctgccatttgttgatcatcttctctgtgccagacactgtactaaatgctttccatacctcatctcattttattcttatactaactgtacaatttaaggatcactgaccacactttaaaaagaaggaaactgagtcctagcaaagttaagcagcttgctcaagatcacrcttgacaagaattgggattagaatgaggtcttctacttccaaaacctgtgtcctttcytttatacctacttggagaataacacagaagccctcctgctctctccctccccctgcccctgcccattttacaaatgagaaatgcagaatgagagcaaggaagtgattggctcatggtcacacaggtatcaaggaacagagccagaattctaactcaggtccacttaattttaaatactttagaaatccactgycccagccaggtgtggtggctcacacctgtaaccacagcactttgggaggctgaggcaggtggatcacttgaggtcaggagttcaagaccagcctggtcaacatggtgaaaccccgtctctcctaaaaatacagaaattagctgggtgtagtggcacatgcctgtaatcccagctactcaggaggctgaggcaggagaattgcttgaacccaggaaggaagtggaggctgcagtgagcctaaattgcaccattgcattccagcctaagtgacaaagcaagattccataaaaaaaaaaaaaaaatccacttcctcagacttcatacttgagccattaaattggaaggatttactttatgacatttacaagaggaaaattctggtgctcagcttttaaagccatctatgccccttgcagggtatgcctagattcatggaggaggagaagctgcttgggctcaatcttgaaatcagggtaggagtatgccagcagaaaggtgcaggtcaggccttccaggggtcaggaatagctggacaaatgcctgggggctcaaacagccccatgttcagcatcacgtagatatgaggctccttccaacccatcccctaactgctaagctccttaggcattttgccccagtttctcaagactggcagggagttgcctakttccccagagggtgmgagttaagctgggtttctgcaaagcaccagcagttcaccatatccttgaaaatctcagagcgggctttgccggtgccctgcccccaggtamagcrgttttgctggatttaatctccttggcagtcactgagcccacactttcctcgtgttctttttacattcggtaacataaaggcccctcgggtttttatttctcctttaaaaatggctttaatcgttaaaaaccaaacctggtgatatttcttaagcttctgcctgagttttgtttgtttttccatgagtctcttccagaactactccatcacattagcttttctggagagtgaggggatatataaacatgaagtgaatgaaatacaggtcagctttggcaccgaaaatatttatcccccagccgatccctatcaaacagacgtaaagtggggtaggagtctcacagagtaataaaaatatcccaggctgcaaagaggaatgggagttatatttcttctttttatattctttcatgtcaattcaattcatcagacttttaagtagctactgcataccaggccccggtaggtgctgagggaacacaaataaaatgggctttctttctgtctaggcctccccagtttactgaggaggraagacatgtatacaactttatatagcttctgattgttgctgtaaatgtttgaggatgtgaattctggagaaaacagatctcggtccaaatccaggcttcatctcttattaagtttattatattgagcaagttacttagcccttttaagcctcagtttgctcatccataaaataagaataataacaatatttgcttttatatgagacactgcctctgaaaccatcaacctagaggcaggcacagagtaagtgttcattaaatgttagctattcctctcattgttgttactactgtggttcctcctgataattaagtatgtggacaaagcgctatggagtaattagttgtgctgcaggagttagagaggacttcatggaggaggtgacaattgatcgagatgtttaaggattattagaagtttgccaaatagaaagaatagggtattccagacaaaagaactagcacctacagagacctggagggtgaaaatcacagctcggccagggactaggagtggccaaacttcaacaaaatgcacatatgtgtttggggagtgataaggtcaagcttgtgaaaggccttgaatgtcacacagaggagcttggctggatttatcctgtgggtgatggggaatcgcaggagactctccggctggggggttcatgatgcaggttccccctatgacctgggcccccagttgctgcgtgggaagctgtctctcacatcgrctcccctctgctccttcccgctctgtagatcatcaaggaccagaaactgcttgtgatcgtggggggcatgctgctgatcgacctgtgtatcctgatctgctggcaggctgtggaccccctgcgaaggacagtggagaagtacagcatggaggtaagccctccatgccggcaggagggaagcctgcagatgcagcccctggcacatgaggacagtgaggctgcacagctcccagactgcccagtaccccactgggaacacttcatcagttccatttccttccatttgagacaygtaattccagggaggccaaatataaggtgttgtgaaagaagttgattttaatattaatacacgcagaatgaatgggaaatgttgggctttttaagagtatattcttatrcattgtagaagccttcatttataagatccatcacttgagaaatgacattgcatatttatcccaattttaaagtaaatctcctaaaaagtgctactagtgtgtaaacattctgaaagctccttctagatactatattgttttcaaagtgatgggcaatatatttcttttcacacatttgaaatcagatatttgttgttaaaataaggaacctcacataaaagtactgttaaatatatttttagttgtcttgcagtcagccttgccctgaactcgcactggtctttctaggattctccagattagggaattttgagtcccttaggacgctgtagttttgttgactttcatttagaatagttagactgtctttgcgggctacagctgagctgcagtggggtgtgctatttggtaggatttcggtasagtgtaacaaactctaagaaaataagaatctctgtttctctcactgctttgttagagagatcttttgtgggaatttagtgtgaattcttacactaaaccagaaatggtcattctatgcactgagggcagagccttttatcyttctagacaagaaggttttatagaaaataagatgctcagcctcatttatctcgagacagtgtttactcagcttggtaagaagttatgcatgcattcagagcagcagcagagaatgccatataggaaagagattgagaactatgtccctccacctgaccaccttccacatagaagtgggactccagacagtcacaaccagaactggtaaggaggaaagacccgacactggctctgcccacgggccaagggggcaggaactgagtccactygagcagacaggctatttttggacggggggacatctggtcaccattcaccctgcaaggtaggcaacagaacagctgggtgggtcccaattcatcccaagggaatgcccccttcatcccaagggaattccctgcccagcaccagaatttagaaatccagacaggatgtcaacaccaggaagagctatcattggctaactgggcccctgagctagggagagactgtggcrgtgataataaaaagcaacgatgatawgagcgatgatgatgatgacagctggtatcatgcgttaactcatttaatcctcacagcaattctgggaggtagatgctgtccttaacctcattttactgatgaggaaacagaaaccyagagaggctgtgtaacttacccaaggttacctagcaggttagtgacaataccactaactaccctctcacctactgcctaaccctgcctttcaacacctgggcagctcttagcagttttacaggctttcttaaacctttgttcattggccacagatctgggaagtgagtagggcagggaaatgttctccccttctacagatgaggagaaaaaagtagaataatgggcagactgagggcccaggagatcaagaaataagagcagggtgagtcaggcagagtttgtggaaggcctggagctggaccaggtggacagaacgaggcacagtggctcagtgtggagcccaacagtgggctagggaggctgaatggctgccgcctctattctagatgaaggtgggagctgagtatttacgagrggttcccaaggctccagctgtggtggggagacaccagcagtgccagagtcaacagactctggaagtggggatgcctgtcctactggaccgtttaaacaaggtaaacctgtgcagtctgatgtgtctagctgatggtttgctatcatggctcttacctgccttccttctattctgtaataagcactgctgctatcaatggctctgtgcatagaaccctagcacattccagactttccaaggctatggttctcaaactgaggagtcccagggtgctgcagaagtgcctttctgtgtagataaggaaacagagcctggaaaggtgctatccagggcccagggtcacccagattgtccaaggcaaggcccagataggctgttcctgtgtctccctscagggtgtgctgagatttctctcagaaccttttctggcaggtgcctacttttcttcttttattttagggttggcctgtccctctgttgctatggtaacagaaccctttgatctgtccacccacagccctgtttattgtcgtttttctacaaacagcaccaagccgttggtttctctcagaccctcctctgtcagacacaacagggtagttgaacagtgtgcccagggcctgaggtatcctaaagtctccttcaaggggctgttttgtccaggatctccaaacagaaagcctaggcttgggggagagatgatgaaagacctttgtggcccatccctccctcccacttacctacttcagacaccctgtgtgctccggactctgagcacctgaggattccaggtatgggccttgtaatatggtacrcgtcctagcctttgctcatgctgtgtccccttccagaatcttctctgccaagtatatgacttcagtttcagcaccagtgttacctcctatggagaggtgtccctgtgttcactggctccgctggagtcgagaacctgctctgcctcacttcctcccccagcatcccaaacattccccagtcaggactcccagcaagcaacttctccaggacagggccatgtctcagccagcctccacacagcccacccagcaagcacgccacggccggcatcttccatgggaagacacaggtagccatggcagccacagcctcatggcagcctgcaggcaaatcagggagcagactaaacctgcagacraataaccstatcacttcagatcactgtcgactctgaaagcagtgagagggaaataaacagaacccagggcttgagaataacaggaaggacccatggaagcaattcaccctgagagagcatactcaagggtccttggaatgcaagtcccctagaggcctactgggggcagcccagtcccccatccttattcatttctgtgccataaatattgatcgatttattttattttattttatttttttggagacagagtctcactctgtcacctaggctggagtgcagtggcatgatcttggctcgctgctcaacctccatctcctgggttcaagtgattctcatgcctcagcctcccaagtagctgggactacaggtgtgcaccaccatgcctgactaaattttgtattcttagtagagataggctttcaccgtgttgtccaggctggtctcaaactcctggcctcaattgatccacctgcctcagcctcccaaagtgctgggattataggtgtgagccacctcgcccagccatttatatgtcataagtacttctgtagcactcgtcatgtgccaggtactgttctaaatgctttacaaatatgaactcatttaatttaatctttataataatcctgtgaggtaggagatatttttgcccccattttatagatgaggaaactgagacacagagaccttcagtgactggcccaggtcactcagccagtgagtggcagagcctggattccaccccaggtggtctgctttcaaccatgttgccacccaaccccacatacgggtggaaagggtccctgaggcaggggatggaggtcctgacttctggtttcaccgcctctttcctctctcaggggctacacacagyccctctcagggcaggctgactgtgtggctgtggtcctggagcctgactccatgacgcccctgccactgccaagcctccagctatggctcagcaccccacagcctcctcatgccccaaagtgattccagcctcactctcacctttttcaccagctatgcatcaggccctgtgagggactccagagagacagcagtgaatgagatgtggcccttccttcaaggaccccttagagcagttaggaagacagacaagtcagtggctaactcacaaccctcatggtacagggtgctgtggagcccgaggagggacgccagtctggcctcatagggtcaaagaagacttttcagctgaaagccaaggaggcctgagctggtrtgggagcactcaggcagaggccgctgcatttagagagcaggcagtgtgtccagtgaaccaagtgctgagaggacacaggcagcaaacacaacacacagtgctactccagtgtacattggcacaaccacttggaaaactatttgacatgagtcatgtcaaagatgcacatgccccacagcccagctattccactaggacacatccctaggggaagtctcacacatatgcccaaggagacccaagcctgggtgttcacagcagcactgtttataacagccaaaaactgatagcatcctaaatggcccacaggaacagaatggatacgtgcactatggtattttcaaagaaaggaaggctatacagctgtgggaatgaatgagccacagccatacacatcagtttggaggcatctcaacaacacagcaatgagcaaaaacagcaagtcacgcatgaatacccaaaacaggctttcacacgcttcaagttcaaacactggagaaactgaacagaatattgtttaaggatacatacataggtagcaaaaccattttttaaaaaaagaagaaggcaatttttaacacagaattcaagattgtggttacttcttggtgggcaggataggaggatatgattgagacaggcacacaggtcctgtaaggctctggcaattctgttcttcaaattgtacatatacattatatctcctcttcagaaactatgatgtgggggttttttttkttgttgttgttttttgtttgtttgtctgttttgttttgttttgagacaggatctcactctgttacccagactggagtgcaatggcaakatcacggctcactgcacctcccctggctcaggtgatcccccagcctcagccccccaagtagctgggactacaggcatgcgccaccacaccccattaatttttgtattttttgtaaagacggagtttcctcatgttgtcwagactggtctccaattcctgggctcaaatattccacctgccctggcctcccaaagtgccgcgatgacaggaatgagccaccatgcccagcagatgtatttaattttttaaattttatttatacttacttaatagactttatttcttagggtagttttaggtttacagaaaaagttaacagaagtacaaagagttctcatgtaccctccacccacccccacaatttcctgttattaatatcttgcattgtctggtacattttttcaaatgatgaaccaatgttgatacattattcgtcactacagtccatagtttacattagggttcactgttctacgggctttgccaaatgcatgtcatgtagtcaccattacaatatcatacagagtagattcactgttctaaatatcctctgtgctttactaatccttgacaaccacggatccatagtttttccttttccagaatgtcatatagttagaatcacagagtatgtagcctttttagactggcttctttcatttagtaatatgcatttaaggttcctacatatatttttgtggyttgatagctcatttctttttatcagtgaataatatcctatttcctggtagctcatttctttttatcactgaataatgtcctatttcctggatgtaccacagattgtttattcattcacccaccgaagggcatcttagttgcttccaagttttggcaattatacmtaaggctgctacaaactttcatgtgtgagtttttgtgtggacataaattttcaattcatttggataaatacccaggagtgcaagttatgattatatggtaagagratgtttagttttgtaagaaactaccaaaccgtcttccaaagtgactataccgttttgcaaacccacgagcaatgaatgggagttcctgttgctccacatccttgcctgcatttggtgtcgtcagtgttttggattttagccattctaataggtgtgtgcttgtatctcaktgttataatttgcaattccccagtgacatatgatgttgagcatcttttcatatgcttatttgccatctagtgagargactgttcagaacttttgtgcactttttaaataggttgttttcttattgttgaattttaagaggtccttgtatattttggatgcaagtcctttattagatatgtgtttcataaatattttctctcagtttgtcttattctcttacattgtctttttcagagcaggagttttaaattttaatgaaatcgagcttattacttttttctttcatggatcatacttttgatgtatcaaaacactcattgccaaacacaaagttaccttgatttttttctgttatgttttatggttttacatttaacatttaggcctgtgacccattttgagtaaaattttgtgaaaggtgtaaggtctatgtctagactccttttgcgtgttgtccagttgttccagcactgtttgctgaaaagacgatcttttctccattgtattacctttgcatctttgtgatagatcagttgactgtgtttgtgtgggtgtattkctgagctccctgttccattacattgatctattatttcatcaatcccaccctatgttggttagcatagctttatagtaagtcttaaagtcagggaatgtcacttctccaactttgttctttaatgttgtgtgagatcttctgggtcttttgccactcatgtaaactttggaattagtttgttgatatccacaaaataatctgctgggatttttattgggattacactgaatgtatagatcaagttgggaagtattgacatcttaccaatactgagttttctgatctatgaacgtgaaatatttctccatttatttagatctttttttattttctttcattagagtattgtggatttcctcatgtagatgttttacctaatttgttagatttatacctatttcatttcatttgggtgctaatgtaaatgggattgcgtttttaatttcaaatttcaattgctcatttctggtccaggcatacctcactttattgcactttgcagattttacattttttacaaattgaaatttatggcaaccttacattgagcaaatctataagcaccattttttctgatagcgtttactcactttgtgtctcggtgtcacatgttgataattttcataacatttcaatctttttattatcattatatctattatggtgatctgtgatcagtgatcattcctgttactattgtaattgttttggggtaccacaaaccatgcccagataagagggcagactttatttgttaagtgttctgtgcgttctgactgctctacccactgytcctccatctctcttcctctccttgccctattctctaagacacaatattgaagttaggtcagttaataaccctgcagttgtctctaagtgttcaagtaagagaaagagtcacacatctctcacttcaaaccaaaatcttgaaatgattaagcttagtgaggaaggcaggttgaaggcaggttgaaagcagagataggccaaaagctaggccgactgcactcaacagtcaggttttgaatgcaaaggaaaaattcttgaagggaattaaaagtgctgtttcagtgaacacatgaatgataagaaagcaaaacagccttatggctgatatggagaatatttgagtgatctggataaaagatcaaaccagccacaacattcccttaagtcaaagcctgatcaaatctcagtgaactagatctcttcaattccatgaaggatgacagaggtgaggaagttgcagaagaaaaattaaaagctaacagaggctggttcatgagatttaaaaggaaagaaatcatctctataacataaaagtgcaagatgaagcagcaagtgctgatacagaagctacagaaagttatctagaagatatagctaagatctttgatgaaagtggctacactaaacaacacattttcaatggagatgaaacaggcttatgttggaagaagatgccatctaggtctttcatagccacagaagagaagtcaatgcctggcttcaaagtttcagaggaaaggctgactctcttgttaagagctaatgcaggtagtaactttaagttgaagccagtgcccatttcccatttcaaaaatcctagggccctgaagaattgtgckaaatctactctgcctgtgctctataaatggaacaacaaagcctggatgacagcacatctgttacagcatggtttcctgaataattttaaatctacttttgagacttactgttcagaaataaattaattaattaaaatactcttttcaaaatattattgctcattgacaatgtacctggtgtattagtctgttcccacactgctatgaagaaataccygagactgggtaatttataaaagaaagaggtttaattgactcacagttctgcattgctgggaaggcctcaggaaactttcaatcatagcagaaggcaaaagagaagcaggcaccttcttcacagggtggcaagatggagtgagtgcaagaaggggaaatgccagacgcttataaaattattagatctcgtgagaatttactatcatgagaacagcatgggggaattccgccacccccccccaccatgatccaattacctccacctggtcccacccttgacatgtggggattatcgggattaccattcaaggtgagatttgggtggagacacagccaaaccrtatcacctgattacccaagagctctgatggagatgtaaaagaagatgaatgttgttttcatgcctgttaacacaatatccattctgcagtccatggatcaaggaataattttgactttcaagtcttattatttaagaaatacatctcataagactataggtgccatagatagagatttctctgatggatctgggcaaagtacattgaaaaccttctggaaaggattcaccattctagatgccattaagaacatctgagattcgtgggaggaggtcaaaatgtcaacattaacaggagtttggaagaagtttattccaacttttatggatgactttcagggtttcaagacctcagcagaggaagtaactgcagatctggtggaaatagcaagataattcgaattagaagtggagcctaaagatgtgactggattgctgcaatctcatgataaaactttaacaagatacaccaaatacagcatctaagagagatcaggatcagctcagagccaggagggactctccacagtggggaaaatagatctttagtggtccgcattcccatcacagatgcctgaaatactagccaaggagagctccttagtactcacaggccattagcttagtatagggagctgcctggagtccatacaactgcattttccagaggatttcactctgggtcccattcactcacccccctaaaacccaagctgctgcatcaggacaccattttgagagcccagcacccaccagaatatatcctgctctagggcccaaaagcccctacatctatacatactgaagcccaactgacattcccccacatccacccagagggctgcagcattatgacaccagccataacttgtggcacagccgggtccccaggactctagcccacacagcgtcctatgccccagagaacatcaatgtaccacaccaggaaggctacccccaggacaaagggacccaaagcatgctctccccagagcctgagaattgcctgcctggggatgccgataacccctccccctccagcagcaggaccctcatgcacctgcagacaccttcagggatcttgaggaccagtctgtcccactcaccataaccagcatccatgcacaccatccatggacctgaggacaggtccaccctgcctgctgccatcaccacccacatgtgctatctgggaatctgagtattagtccaccctgcccatgactggcatccatgagcacttcataggggccctagggctggccttcccagccctccagcaccacccacccaaccattatcactacctggtggccttaggactgaccagccacctcttctgccaccagaggtggctatgcawgctgcctaagggcccaaggaccattccacctaggcccaccattgacacttctgatgtccacacacaatacctggggacctgaggactggcacacccagtagacaactgccaccaccagtgcccytacatgccacccaggggccagccccaggaccagcttgcctggtgtccttatctccagtaaagcctcaacatagcctccactaataattacagcctaagctactgagaaattcacagcaatcactgatgttgattacagccaaagaaatcatacagagactacactactaagcccattcagaatcaaagccaaagtaccctacccagccaacactatagacacatgtacaggaaaaattatttccccatgaaagtcaatccctaaaattggaagaagcagctgttataccagatgcacagatatcaatgtaaggatacaagaaatttgaaaaagcaaagaaacatgatacctccaaaggaacacaataattctccrataacatattccaaagaaaggaaatctatgaaatgccagaaaagaaattcaaaatgatgatcttaaggaaattcagtgagatacaagacaacacagatggacaaacacaaagaagttgggaaaactatttgagatctgaatgtgaaattcagcacagagatagatatcattaagaaaggaaccagacagaaatcctagaactgaagaattcaatgaatgaaattwaaaaacacaattgagagcttcaaaaatagactagatcaagcaaaagaaagaatttctaaatttgaataaagccatttcccagataagcaaaaacaggaaattcatcatcactagaccatccctacaagaaatggttaagggattcctacatctgggagtgaaaggatggtatctgccttcatgaaaacacacaaaagtataactcactggtagagaagagacacraataagaaagagaaagaaatgaaatgttagcaccattgaaaaccaccaaaagacaaaggtaaataataaaagaggaataaaggaacaaaggatatacaacacaatcagaaaacaattaacaaaatgacaggagtaaatctgcacttatcaataacaacattgaatgtaaatggtttaaatacctcaattaaaagacatagactggatgaatggatttttttttaaaaagccaactataagctgcctacaagaatctcacttttcctgaaaaagatataaatagactgaaagtgaaggaatggataacaaaattccacacaaatggaaaccaaaagygtgcagaattagctatacaaatatcaaacaaaatatactttaagtcagaaacataaaaagggacaaaggagaacatgacataatgataaagggatcgattcmtcaagcagatataacaattgtgaatatgcacccaatgccagagcacccagatatataaaaaaaattattaaagctaaagaaagaggtagacyccaatataataatagttggagatgttaacaccccactttttagcattggacagataatctagacagaaactcaacaaagaagtgtcagaattaatgtacattgtagaccaaatggacctaacagacagttatagaacgtttcatccaatggctacagaatacacgtttttctcatcaacacatggaacattctccaggacagaccatatgttaggccacaaaacaagtctcgacaaatttttttacatcgaaatcatatcaatcatctctcaaatcacagtggaataaaattagaaatcaataacaaaaggaaccttggaaactgtacagaaacatggaaattaaacaacatactcctaaacaactgttaggtcaatgaagaaattaagaaaggaatttgaatatttcttaaaacaaataaaaatgaaaacacaacataccaaaacctatgagatacagcaaaagcagtgcaaagagggaaacgtatagcaattaacactcacatcaaaaaagtagggaaatttcaaataacctaatgatgcacctcaagggaccagaaaatcaagaacaaaataaattcaaaattaatagaaggaaagaartaaatatcagagcaggattaaatgaaatagaggctaaaaaaatacaaaggatgaagaaaatgagaacttgtggggttttttttttgagaagataaaatcaataaaccactagctagactaaacaagaaaaaaaagatgaaaataaagaaaatgagaaacaaaaaggagacataacaactgatgccacagaaatacagaggatcactagagactattatgaacaactatatccaacaatatggaaaacctaaaggaaatgggtaaatttctggacacatgtaacctaccaagattgaatcggaaaggaatagaaaacctacacagaccaataatgagtaacagaattgaatccatacaagaagtctcccaacaaagaaaagcccaggacaagatggctttattgctgaattctaccaaacttttaaagaactaacataattcttctcaaactattccaaaaatttgaagaggaggaaattctttcttattcattctaccagaccagaattaccctgataccaaaaccagacaaggrcacaataaaaaaagaaaactgcagaccaatattcctgatgaacatagatttaaaaatctagatgaaaaaatattctccgggcacagtggctcacgcctgtaatcccagcactttgggaggccagggaaggcggatcacgaggtcaggagttcgagaccagcctgaccaacacggtgaaaccccatctctactgaaaatacaaaaaaattagccaggcctggtggtgcatgcctgtaatcccagctacttgggaggctgagacaggagaatcgcttgcaacccaggaggcrgaggttgcaatgagccgagatcatgccattgcactccagcctgggcaactctgtcccgaaaaaaaaaaaaaaaaaaacttcaacaaaatattggcaaaccaaatccaacaacacatcaaaaagataatacaccacgaccaagtgggatttatcctagggttgcaagaatgattcaacgtaaacaratcaataaatgtaatatattgcattaagagaatgaaggacaaaaaccatattgttatctaaataaatacagaaaagcattttataaaattcaacatcccttcatgataaaaaaaaattcaacaaattaggcatagaagaaacatatttcaacatactaaaggccatctatgacaaacctacagctaatatcatactgaatggagaaaggctgaaagcctttcttctaagaactgaaacaagacaaggatgctcactttcactagtcttctttaacacagtactggaagtcctagccagagcaattaggcaagagaaagaaataaagagcatccaaaagggaaaggggggagtcaaattgttcctctttgcagatgatatgatcttatatattttataaaaacctaaagactccaccaaaagtactcttagaacaaatcaataaattcagtaaagttgtaggatagaaaatcaagatgtaaaagtcagtagtatctctatacaccaataacaaattagctgaaaaagaaataaagcaatttcatttataatagctacaaaaaatgtctaggaataaattgaccaaggaagtgaaagacctctacaatgaaaactacaaaacaccaatgaaagaaattgaagagaacacaaagaaatgcaaaaacatctcatgttcggggattagaagaattaatattgttaaaatgaccatactgccccaggcagtccacagattcaacgtaatccctatcaaaaggtcaatgacattcttcacagaaatagaaaaaacaatctgaaaattcatatggaaccacaaaagaccctgaatagccaaggcaatactgagcaaaagatataaagcagaaggcattcaactacttgactgcaaaatatactacaaagctatagtaaccaaagcagatgatatttgtatgaaaacagaccatagaccaacggaacagaatagaaagcccctaaataaatccacatatttatagccaactgatttttgacaaaggtgtcaagaacatatactggggaaaggacaccttctttataaatgatgctgtgaaaactggatattcatatacagaagaatgaaactagacccctgtattagtctgctctcacactgctaataaagacacacccaagactgggtaaattaaaaaggaaagaggtttaatagactcacagttccacatggttgcagaggcttcacaatcatggtggaaggaaaaggagaatcaaaggcacatcttaaatggtggcaggcaagagagcttgcgcagggggactcctatttatgaaaccatcaggtctcgtgagacttacttactatcacaagaatagtatgggggaaattgcccccatgattcaattatctccacctggcgccacccttgacatgtggggattattacaattaaaggtgagatttgggtggggacacagaaccaaaccatatcaacccctatttctcaccatacacaaaaatcaactcaaaatggattaaagacttaaatgtaagccctgaatatatagaactactagaataaaatataggggaaatgyttcaaaacattggtttaagcaaagattttatggctacaactttaaaagcacagacaacaaaaacaaaaatagataaattggactatatgaaacgaaaagacctctgcatagcaaaggaaacaatcaacagagtgaagagacaacctgtaaaatgagagaaaatacttgkaaactatttatccaacaagggactaatgtccagaatatacaaggaactcaacaggaaaaaaatgaaataatttgattaaaatgaagacaaaggatcagaatagatatttctcaaaagaagacatacaaatagccaacaaatacatgaaaaagtgttcaccatcactaattatcaaggaaatgcaaatcaaaaccacagtgaggtatcatctcaccccggttagaatggctattttcaaaaagacaaaaagtaacaaatgttggcaaggatgcagaaaaaagagaattcttatacactgttggtgggaatgtaaattagtrcaacaattatggaaaataatgtgggggtttctcaggaaactaaaaatagaactaccatatgattcagcaatcccactactgggtgtttatccaaaggaaaggaaatcaatatatcaaaaggatacttgcacccctatatttattgcattattcacagttcctaagatatggaatcaacctcaatgtccatcaacagaaaaatggataaagaaaatgtgctgtatatatacacaatgggatactatttaaccataaaaaagaatgaaatcctgtcattcacaacaacatgaatgagcctggaggatattatgttaagtgaaataagtcaggcacagaaagataaataccatgtgttctcactcatatctggaagcagaaaaaaaaactgagctcatggaagaagagggtagaatcgtgggtactggagattggaaagagtagaaggtaggggagtatggggagaggttggttaacaaatacaaagttacagctagactggaggaatgaattcccgtgttctgcagcactgyaggatgaatacggttaactataatttattatatattttcacaaagctagaagagaggattttgaatgttcacaatataaagaaatgataaatgttcaaggtgataggaatgctaattatgctgatttcattattacacattttatacacacaccaaaatagtctgtatcccataaatatgtacaattattacatgtcaactaaaaataaaaggaaaaaataactttcatgagtgaggagttgcttctyatggaaaagcaaagaaagtggtttcttgagatggaaactactcctgatgaagatgctgtgaacattgttgaaatgacaacaaagaacttagaatattccataaacttagttgataaagcagcagggtttgagaggattgattccaattttgaaagttctactgtgggtaaaatgctatcaaacagcattgcatgatacaaagaaatcrtttacgaaaagcagaatcaatcaatgcagcagactccgttattatcttaagaaattgctacagccaccccagccttcagcagaaaccacacgtgggtcagtcagctgmcatcaataaggaggtaaaaccctccgctaacgaaaagattaccactcactgaaggctcagatgatcattagcatttttaacaataaggtatttttaattaaagtatgtatattgtttgttagacataatgctactgcacatttaatagaatactgtatagtgtcaacataacttttatgtacactgggaaaccaaaaatttgtgtggctcactgtattgagatatccactttattgcagtggtctggaatctaacctgcagtatctttgaggtgtgcctgtataggaaagcaagtgatttttgtatattagcctaatatcctgaaactttgctataattacctgttagttccaagagtttttgtgttgattctttgggactttctatatagacgatcatgtcatttgcaaacagagacaattttatttcttccttcccartctgtatacttcttatttcctttcttgacttactgcattaactagaacttctagtacaawgttgaataggagtggtgggaggggacatacttgctttgttctcagtcttcaggaaaagcatctagtttttcaccattaagtaggttaatgtatcttttcttttcttaaaaagttaaaaagccactatgaaatagttttgaatagttttgatggccaaaactgaggatgcctttgaggaaattagaggaaggtcgaatgatgactcaggcagagctaagattgttagggatcttgtgtgctaagaagaggagtttaaacttcaaaattaaagatatctcatcaggggagtgacatgatcagctttgccctggctgcacggtgagaacagatggaggggcgaggctggaagcccagtgatagctggatgtttttgcagtaattcaggcaaaagctgatggcgacctaagccagggcagtcacagtgggaacagagaagggtgtggatttgagagctatgtagggagcagacatgacgagacgtggtgattgactgactctaaggggtagtgatatgggggcagggagggcaatgctcagatttctgcctggggtgcttggggaacctcttcattaaggcaggtgtggaatgagaatgggcttgggaggcaacatggggaattcatttctggccataagtttgagtcacctgagggccttctaggcaaaagggctaagaagatgggctgcagggtcccagtggacaaaagagtagtttgtccagtcggtagagatttgtggggaagcagctagttagcacattgaggatagagtcatgagagtgagtgtagtaacccagagaaagtgggtgcagtgagaagtgaagaagtccccataggagccccgggaatcactgagtgattaaacagccatgcgcacaggaggacgagccagggaaggagaattttaagcagtgggataccaggagagagaaccatcactggtgaggggacaggagagagagctgtccccaggcagatggtcaagagagagccattcacaaatggaagaatttgaaaagggagagtgagggctccagagacaaatgccccagactgaggcaaggactgacaggtgtcccatgaactggccctgtgctcagtgctcctgcatcccatctcagcctttcctcttctttagagtctgatggaaagattggctgtttctgcatttcagatatagcaggtgtagataaacctgccaaatatgttaaaaaggtttttaaaatatgatttgtattcttggaaaaaaggaaaatagctctcttttttgagcacctactctacttgtggtgacggtgagtaggtgttggacatacggatctgaagttcagggagaggtgtgggctggagatgggaactcagatggggcagcttatggatggcaatgacaatcttggatgagggcaccaagagcagtcagagcgatggagaagagaaggggaccaaggactcaccctggatcctgygcatgtttggagactggaaaggtgggggaaattgacaaagaagacctagcagaagctcagcaataggaagaaaatcagatgagtttggtgtcttggaaaccaaatgaagaaagtgtttcaaggaggaagttttgatgaactgcgtcaaatgctgcttttagatcaagtaagattagggccacgaattgacagtatgtatgtgtgagtatatgcacacacctccatatgggatttttttctttttttcttttttttattttgacggagtcttgctttgtcacccaggctggagtgcagtggggcaatctcggctcactgcaagctccacctcccgggttcacgacattctcctgcctcagcctcctgagtagctgggactacaggcgtccgccaccatacccggctaatttttgtatttttggtagacaagggatttcaccatgttaatcaggctggtctcaaactcctgacctcatgatctgcctgcctcggcctcccaaagtgctgggattacaggtgtgagccaccgcgcccggccaggattcttttcttttaaggaaaataatttgagataattttccccaaaagtaaactcagtacatacagatggtgtgatcctaggtggagggttgttcattttttcccaagccttcctttcatagcaagccaccatttacacctmcacctgaccattccaaaatggtcttgaaatggagcgacatggcagacagcactcaaggtcactgaakattgaacacccaggtgagccacggaaccacagggcagccactgtggcaggatcctgaggctgcctgcacaccccgaagtcttctctcatcctggtccccacaggatgccaagcaacctatgtcaggaattccctacactctagcttctgtggctttctggccatttgagcagtaatcaagttaagggccatttgggacaaagggatatttcagaactttcctccagcttccgtagtcttgccattcttctgtggaagcacacaggggatttggaatcatggaactacacttggctttgagcctggtggttataccagttatgtttctatggaaacagatattggaagaggcaaacacatagagttttaaataatttcaactcttaccttctatctccctctacagctgctctggggggaaaaaaagtcaatcctaaagcaggcactttcaggaaacagctggtatcttcataaagcctgtccaagcctgacttcacgctactcatttgaaaataaagagacattgtaatggcctgggtgggggaagtgctggagaccagggtctgccctacccagtaggctgctcacaggtggcctggtggccaaaggctttggatgctaagggtcacactccaagtgatgggtcctcactgctggagccatcagccctgaacagtgagtgaggctggtcttgtcacacatagttatccatggtgccctggatggccaggctggggccccagccagatgcagaccatggtccaggcagggcagtggaactccacaggggccgttggttggtccattacccatgggctgcctccattagcctggccaactcctcctagggaggaccataccccatctgaagttctaaccacatcattctcctgtttaaaattttccccagcagctaaaggatgaagtctgtactccttagctcagctcaggaggcctttgatgatccggctggctcgcctccctagccttatctctcacaacccccttccttgttccttgtgctcagctaccctgagctattgttacttctccaaagcatcccactctcttcctctatgcctgcgcaccttctacccagaacaccccctttccacccccaatatgccatcttcatatgtaaaatccctgcttgacctttgagaggcagcttagaagcatctcctccaggggcctgtggaccacatgggctgcctggatggacacctgtgtcctgtgcttccatctcacactgttcaccctcattctggtcacagaactgatcattgyctgtctgtgtgccggtcccctcttgtctgtgacctcctcaaaggccatggccatctgtgtgtccccagcacccaccaccagtgcctggctcaaagtaagtattcagtaaatatttattgactaaattattccctccacctggagctctccccatgcctccatatgtccaatttcaacccatctgtctgggcccattaagccggcttctcgaagaaatgtctttgccgagttgcaatttaatttaatattacaccctcaccttttgtcaagagcccacttctggggctgaggctgccaagtgaagcatgattcagcatctactacgaaggatgttgttcagtttgtgtccccgagataaagatccacaggttaggtcctcgtggaactgagtaccaggaaatgggctgtgctctctccgtgaacttgtatctacttccttccttccatcaggcaatcgtaactggataagccactctgtgttctttttaaccttggctgccagaaagttggagccaaattcaacgctcagccgcaataaccatcttatctcaggttcctggaggattatctcaccttctgatcattcgtctttatttttaactgtcctgttgtatttaggcttttaatgtgtgctgtcttgagccctctgggagaggaggcaaggtgtaaattctagattaagttattaaaacaagaacktcaggcgagatttaattggaatgatatgccagagagacattttaagggtgtccacagccacgtgccttctggyatggatcctggcccagcctcggctcggctctgcagtcagcattgtgggcacagatgtgtctgggcccagtgtatggacagaatagctctgccagcyaccgccgcgattctggaacatcttgtgtggaaaggtgtgttggattcacgagagattgcagttgatttcatcttccttgttggcttcccttatgtctgtgggcagcacatggggccagccagaggcccattaggacacaaatcacaaaagacagagccacagcaccagggccagccctgaagctggaacttctccatctctacctgtccaggaactcttcagggcatgagctgtttgctagaaattctcaagtgtcatgaacagaatgattggaaacttgtgtgacatcctggcttcttctgaccactgtatttgtcttgttaaagccatttttgttcctgagcaaaaagagtctttaaatttttattatttttaacccaatgccacacatccatgttggcagaaatacaggctgcagtccccatgaagaccttccctcttttctgtgggtaaactccaaccaacctacctcttggyaaatggttcatcatcagggtgctccttcagcatttatggggtacccattgtctgccatgctcccttaygtactgcatgtctgatgagcaagattaggtatgtccataaagggtggtgttaccagcttgctgctggtaggtctgtggttgatgctatcagagaaacacacaggcatgagccaggcgtggtggcttatgcctgtaatttcaacactttgggaagccaaggcaagaggatcacttgagcctaggagttcaagactagcctgggcaacatgacgagaccccgtctcaaaaaaaaaaagagagagagagaaacacacacacagaatagattgtaaacaacagcaacagtaccctcttgatgacatttgcctccaaacacttggttttaagtttaagttactgtgctgagacactggacttaattttctaaagtatgaactaagattgaatctgggttaatgtctctcagagggcaaagaagtgagagagaacatgcattagtcagggtctgctaggttttgctgtagtaacaaaaaaaaaaaaaaaacccctcactggattaaagcaataaatgttcttttttcatcacagcacttgtccactgagaaccagctgcagctttcccccaccatggtgtcctmccccgggacacagctggtggcaaagggaaagagtgtgcggcaaagtgtgygccagctttgagcttccaccccagagtgtcacatgtcacttctacccatatctcattgcccagaatgcatcatatgtccatgcccgagttcagtgagccagggaagagcaatcctaccgtgtgcccagaaggaaagagagaaccaggtattgctattcagccatgatgactacactagcatattcccctggcttttggttgctgtacaaataccacaccattcactagaatgtgagctccatgagaatacagggggagggagggttgtgtttcattcactgctatatcctcaacatctgaaaaagtacctggcacatagtacatactcaataaataatattagttgaataactgaggaaacacaccttagagaaatcttgttagatctatgggctattctctgaaaaattttgtacctgttctgcagacgctattgccaaatcacatcctaatccatcacttctgtctgcctccactgctgtgactggggtccacaccaccgtcatctcttatcatctgccattccagagttggggtgcaatgaggcaaggctacaggtggtgcaaaatgagcaagtggtttggtgaataaagagcctttattgttgaagtcactgagttgtttgtggtggtggatgtaatcatagctttccaaggcagactccagctcattgctccttccaagtcattctctgcatggctgactggcagacagagggatctttttctttttgtttcttttttttttttttttttgagatataattcacatatcataaaattcagtctttaaatgtataccctagtggtttttagcctattcataaagctgtgcaactatcaccactatcttatttgagaaaaacgttgtcaccccaaaaagaaaccttcttttatccatcaccccttctttttcccttccctccagtccctagcaaccactcatctattttcagcctttatggatttgtctattgtggacatttcatgtcaatggaatcaaacaatctatggacttttgtgcctggcttctttcacttagcgtaatgttttcaaggttccttcatgtatctgcactttatttctttttatggctaagtaatatccccttgttttaatatattgcattttgtttttccattcaacatttcatagatattttggttgtttcaactcttgactattatgaataatgctaatgtgagcattcatgcacaaatttttgtgtgaacatatgcttttagttctcttggatatatacctgggagtggaattgctgggctacatggtaaccatgttaactcatgttaacatttttaggaacggccaatttttcacagtagctgcaccattttacattcccaccagcaatatatgagggttccaatttctccacattgctgccaatccttgttatttatctgcctttttgattatagccatcttagtgagtataaaggtttctggtggttttgatgagaatgactatcaaataactaatgactaatggtgctgagtgtctttttacatgcttattggccatttatgtatctttgttggagaaatgtctattcagagactttgcccatttttaattgaattattcatctgttttttgtggagttgtaagagttctttatatattctagatactaggcctttgtcagatatataatttacaaatattttctctcattctgtgagttgtctttgcattttctcaataatgtcctctgacacatgaaaaattttaattttgataaagtgcaatttatatattttttcttttattatttctgctttaggtgtcatagctaagaaactattgtctgatccaagctcatgaagatttacacttatgtcttcttctaagagttttatactatttgttcttacatttaggtatttgatccattctgagttagtttttgtacatggtatgaggtagtgatccaaattaattattttgcacgtggatatatagctgtgcaagcaccacttgtttgttttggttttttcragacggagtttcactctgtcgcccaggctggagtacagtggcacaatctcagctcactgcaaactcctcctcccaggttcaagcaattctcctgcctcagcctcccgagtaactgggattacaggcacccaccaccatgcctggctaatttttgtttttttagtagagactaaaaaaataggctcttggccagcctggtctcaaactcctgacctcagcctcccaaagtgctgggattataggcgtgagctaccgcccctggacaccacttgttgaaaagaatatcctttccccattgaatagtcttgtaacccatgttgaaaatcarctgaccatggatgtgtacttgtatttctggattctcaattctattccaccaatttatatgtctatccttatgccaacaccatgctgacttgattattgtagctttgtggcaattaaaattggaagtgtgagtcttctgayttttttcttctcttgcaagaytgttttagctatgcagggtcccttgagattccatatgatttatacgatcagttttttcatgtctgtaaaaaaggctgttgggattttcataagcgttgatttgagtttgtagataatatggggagtattgccatcttaagaatattgtcttccaattcatgaacatgggctatcttttcatttatttaggtcttctttaatttctttcagcaatttttttttcttccgagatggagtctcactctgtcacccaggcgggagtgcattggtgcaatcttggctcactgcaacctccgcctcccgggttcaagcgattctcgtgcctcggcctcctgagtagctgaggttacaggcacccaccaccatgcctggctaatttttgtatttttagtagagacagggtttcactatgttgtccaggctggtcttcaactcstgacctcaggtaatccacctgycttggcctcccaaagtgctgggattacaggtgtgagccactgaacccagccttcttggtggattctttagaattttctacccataagattatataatttgcaaatagagagttttgctcctttcattccaatttgtatgcttcatattccattttcctgaatagccaaaaaattctcggatagactttcaacctacttatatctttgaatcaaaagtgagtcacatatacagcaaatatagtcagatcatgttttttttaattcattctgccaatctctgcatttcaattggagtgtttaatccattttatgtaattactggaaaggcaggatttacatctgccattctggaagatacttttttgtttttgagacagagtctccctctgtcgctcaggctggagtcagtggcgtgatcttggctcactgcaacctctgcctcctgggttcaagcgattctcctrcctcagcctcccgmgtagctgggactacaggcacatgccaccatgcctggctaatttttgtattttttagtagagacggggtttcaccatattggccaggctggtctcaaactcctgactttgtgatccacccgccttggcctcccaaagtgctgggattataggcatgagccactgcgcccagccagatatcttttttaaaygcacgacgtatcttactattttgcacttaaaattctccaatttaaaataaaacccacacttcttaccttgctacaggtcctacacaatccagtcccactccatatctgacttcatctagttcctctccctgtgctcacccyagtctttagccatgtgggccttctgtctggagctctaacactccaactttattcccaactttgtgcctttgcattcatgattcttctgcctggaacgctcttcctccaaaccttttcagactctttcctgtcattcagatctagcttaaatgccacctccctgatcaccagatccttaaatgtcccccaacattctttctcacctcccctgtttctccatcacattgcttattcctcgttctctcatctatattctatcatccactagaatgtgagcyccatgaaacagggcccttaactatcttactcagagctctttctccatggccttgcacagggccagacagacacacagctcartatatgttggttgaatggatgagtgaatgaatgaacaaaggaatgcgtgcatgaatgaatggatgatggacaagcttccctggcatgattcttgtcagcactgacaacagctgagtaggtaatgtggttgctcagtagctggattgaactattggatgaatatgttgatactaaaaagaaaaataagtaatgttttaaaggtgaagaggaagtttggttgttgttgttgttgttgttgttgaatgatttcaaagagaaacttgactcgtggttctcaatcctgctacatcacccagaaaagatctttttgaaaataccggcccgggtcacaccccccaaaatatctgatttaactggcttagaaagggccctgtgcatcaggaattttttaaagttgccatgggttctggtgtgcagccrgagttgagattctctggtccagactctcacgaatctctaggaagggcccaagactgtaccttggataccagggtgataaatagactcaggacaataaatttttacgactagaaagtaaaagaagaaaaggctgaatccagaaaatctgaagtccagttggtccctgccagccagagatgatgatgatgacaaaagaattacagactcagagagaggcccacctggggagttcatgtgtgcagaccccaaagagctacgcaggccctctggtctcatatttttctgaaaatctttgtgttagcatttgaacaattgtttcyccagtggaagagagagagcaaggaagaggaaaaaagggaggtttctatgaggtttctatttctgcagcattgttcattgcaatgggaagacagagggtgagcaagttccacaccagaactttaggcaggtttgtttctaagtgctctacaatcacaaggaaaccactgaccacagaaaccaacagggaagaaaaaaggacaagggaaccacagtgtccaggcacctcagcactcatggtggctcggaaaggaaccgccagccctgtggtgggatgttcattcttttctgcccttgtttagcttgaagtttctccctaaagcgatagtggattaagcttcaaatactgagttgttttgtccttgacaaaggatgaaacatttaacatgccccaaagatgctctgttcatgtcagaggaggctgagacaacctgtgaaccaccccttaggggacagcagccagaagaaacacgatcattgctggtcctgcccaaatctcacttcccagcccacccacccatactcttgcccttctctggactggtaccccaactccaggcttaccctactcacatgcaagcacccaatagtaagcaaacacgtactataataatgacaacagtgtctcacatttcaacagcatggcaaagttcacaaagcaccttgacatccccattttagagattcatcagaggaaactaaagctgagtaggtgacctgactggcctgagataaccttgcttgctacgcatgagaactggaacccagcccaagccttgtggtattggatgagtcagtatcccttccactgggattgatccattcacacttcctgcttctttttgcatccgtccctttgttttctttttcttcattgatgctttcaaaattattagcttccaattgtgcataatgttctcttacaaatgcttaaatctctttcacatctgtgattatctggttgatggttcatgagagtgaacagatattcaaatccagcaagtttagatctgagagcttcaccttccagtcccgcttcatccttagtactagatctactcagccttcttctaggatttcaacaaagctgcattgtcttaggagtaacaatagcaaaaataatcatagcaacagcttttcttgagtgcatgctatgtggtaagcactgttccaagttctttgctttatcaactcattcagtcttcacaacaaccccatgtgggaattaccattattatccccagtctacagatgaggaaactgaggcacagaggggttaaataacatgcccatggtcacacagctggtaaatatacaacatgtagcccttagtggttaagcaagtagactctggagctaggcttaactccaaatcccagttcagccacttactgtgtgaagttaggttagtgtactgggctgaattgtcattccccctaaacgatatatgcatccttacccctggacctgtgaaatgtggccttatttgctaaaggrgtctttgcagatgtcattatgttaagggtcttcagaagaaatcattttggattacccggatgggccctaaactcgatgacaggtgtccttataaaaaatacacatagagggacacagacacaggggagaaggccatgcggagatggaggcagaatgatgcagccacagcatggaatgcctggggccaccgggagctggagaagacatggcaggattcttctcttgagccttcagaaggagcacagcccaacggacatcttgactttggacttctggcctccagaactgtgcaaggattaattgtctattgttttaagccgcccaatttatggtagtttgttacaacagctctagaaaatgagtatcatttctgagggcttcagccttaaaatgggcctagataggagaagtgcccactttactgagctttggggaggactagaagggatgcctgtaagatttgcccacacccagcacctggagagcacttgatgaaggttagccctcatacagagcatcatttattacccggcctttggctgctctgccctgaacccttgcagagcccacggaagccagcccttcacattgccatcttcttgtgtctgactcgttgccactgggacccctgagcccagcccagcgtgttcctggctcaggaatctcagaggaatcaaatctgactcccagacccaggctgcagaggcctctctgagccattattaccagggctgccagagcgagactatgaacatccacatgtggcgttttaatattttacccaagaagtcattttcttccacgattcagacacagaagactcgaagaattaaagtgagaaaggtactcagggcctgcatgatttccgccaatgggcgtggaggattttcctgtgtctgttcaggctctttctttcttatctgcgtcttacagcagacgggaagccagctgacgagagattgcatgttcataccaattattaaaaatatatggcaggcttctggaaatgcattcacatgccaaggaaatagaatgcagtcaccagcccaggcccctgcactgtgtgctttggaggaacagtgcggcatctgtaaacacaatgatacaaggttttggaccagattctgccacctcccagctgcgtgaccttgggtgagtgacttaacctctctgagccccagtgcccataggggaagttcattcctccctcacaggtttactgtgagcgtcattaactgagataacatgttcaagtacctagttctgagcctggcacatagaaggaggtcaatcagtctgatttgtttccactccctgccccagaatttcctgactccctaagaaaactgacataactaccctgccaacctcccaggtcctgaggtgcactgctgccaagagcaaacrtgcaggatagatttacaccttccagtgcacttccatggccatccactcatttaatcctgcagactctgctgcagagagtgttctgtttccattttgcaggggagcacctggagagctctgaatcacataggtagcaagtggggctcagaggtgagaagccaggcctgctaatccccaaagctmggctccttcataccccatgctgactgtcaaatgagctgatggatgggaaattgctccataggcaacagagctctatcccagcctgagggctggactgttgttatctccagcacctgtctgtgatcaaggctctttgctacctttttgtccatgtgtattgtcctcacttcccccttctaggcatgagcaggttggatcagtctcatttggctcattccaaggcagtctgtgaacttgccgcatgtgtggttaaaatgtatgcatgctcccactcccacttcccatgtgccttctcatgctccacgctctctgccccacccacactcactggctcgcacatccaggaggtgctcagcacagcctgtcctctgttatgaagaagacttcgtggagctcaggtgcaccatagagccactagagagacacgtgtcattcattcatctgccaaacccacatttactgggcacccactatgtgccagatgctggagccacaatgatgggttaggtgcagcccctgatctcaggactcccccagtccagggggacaagttaattgacaatggcagtgtaggtggcaagtgctagaatagctccgcccggggccctgtggaaacgcagaggaggtggctgctcatcctgccttgagaaatgtttcmcaaaaaaaaaaaaaaaaaaaaaaaaagaagagggacttttcccccaagtcttcaaagaacaaataggatttggataaagaaaacagaagctgtgcaaaatagttcatcctttcctgaaaacgttaaacagagttactattaagacccagcaagttcactcctaggtatacacacaaggaaaatgaaaacatctgctcaaaaacatagacatgaatgtttataggagagctatttataatgccaaaaagtggaaacaacccaaatgttcatctgctgatgaatgaataaacaaaatgtggtctatccatacagggaaatattactcagctgcaaaaagaatgaagtactgacgcatgctacaacgttgatgaaccttgaaaacattatgttcagtgaaagaagccagacgcaaaaggccacatattgtatgattctattggtgtaaaatgtcccaaaccggcaaatccacagagacagaaactagattagtggttgcttcgggctagggaaggagagatggagagtgattgctaatggatatgggtttcttttgggggtgatgaaaactatgagatagccgtgctaattgcacagcattgtgactatattaaaaactactgaattatacacctaaaatggtttaaattgtgaattttgtgctatgtgaatcttacctcactttcaaaaagaaaaagacaggaaaagatacataaggacattccaggtaaagaaacagtgaaagcaaaggtagagagagggggacatgctcttggagaagagcaagtgtccaatactggagcatgatgcactatatttttcttctgtggcttcacagctttagaaggctaaatgattgtcgggtccaatacctgtagtatctgttagatgttgtcggttgcaagtaactcaaactggcataaacaatagagggaatatattggcatcttgaaaaggtccagcagtaaagtggacttcaggcacagtttgatcagggatcagttccatttctgtgatttttttgtccctgctctcctccatgtatgaaatatgtcattacatttgcttctcaggtgtcatggagatatgaaaagaaagatgcatgcatttcaactagagtgattttagagggtttcttggacaacatagaatttttgccaagtcttcaaaagatgggtaaaacctcaaggagtcgatattccaggtagatgaaaccccttgagcaggaaaatgtagggtgtatctggagaagagttcaagaattggttgggtctggcagcttgccgatagaaagtagatgcagggctggagggagcttggactttaacctggaggcactggagagccatacaggaaattcagcagtggagaatgtgatgagctcttgataacgcctactctggttgtcagataattttaygaaattatttttacttttaatagatatgataatattgtggttatgtacattcatgctgaagtgtcatggagtctgcaattgactttcaaacagtttaggagggaaagtgtgcatgtgtgtgtgtgagagagagagagagagaagaagaagaaaaggagaggagaggagagatggggagggaagggagagaggagcagatatggcaaaatgttagccatcattgactcctggaggagaatacacaagggtgtgttgtactgttcagctttkctgtatgagaaaaagaaaaaaatgagagtgggagagacaaagcactctgatagagggacaggctcaggaggtggtacagtgagggggcaagagagaatgagccccgaagggcagggccgagatgccccattggtgagatgcctcaggggcccaagccacagggctcagggtgggtgaacrtggctagggacgtgtataggcacagtagcccaatgactctgcagcttccagcccaagggtccaagaggacccttgtgcctggaatagagcttgaaggcagcagaggaggagaaggagcccccaggcagggctggttttgctccctccataattaacaattgtctgtgtgactaggtgtttagtcatagaatttcagagccggaaacgacccaagaaatctaagcaaatctctcattttcctgatggggaaaccaaggcatagatttacctggactttcagagtcagataggtgactaaggacaagctaccagtttaaaccattcctacaaacaccctggtgactgtccacagcagaaatgacctgaggagacaccagcttgctctgcccttccttggtgaatctttgaaaccttttctgagtgcatatgtcatcagggagctgcttcttgagtgggttgccacgtggggtttcactcgggccaggcactcgctggtctaggggctttatacatattgggccatttaatcctcaatcctatgagacaggtgctatgtctagccccattttacagatggtaatgataaggttacatggtggccacaaggtcacctcatttgtaagtggcagaattgagattagagctcaggcagcctggctccaaagctggcacctttaaccaccttgctacccaccataccccctgtctcctagtcgactggacttccccacattctcagtgactggctgactgatgaattgatgtgtttattgtccagggagagggtcaccaggcagttctggccccagcctcattggtatgtctgcagtaagtcaaggcctatttattactcatagagtattttgggggtctgtgataaagaaaaaatgcaaaacttaatttcacttccctgctacactgctcattcttttttaataaccctctcttatcagcctcctggcagcttttgcacttcctgtgcatgttaattactttattaattacattgatatctttggttctgcccagcatttcttggtactttttgtttgcaacgtgcacccattttgccttgctcattggcatatgcgggcccagttcccatttctaaaagggattctttgagcctcggtaaacacatggctttcaattagtcgcacaatcatcatttcccatttttcaaatcagccacgtcactaatagagtgtttttaacattctcccaaatagaggctgtattgttaagtttctgacattcttcctcaatccttgttttctctccacgtcacagctcaaagaaccccatataccctagcatggagtgagatgctagacactaagaagtctagggggaggaagcacgggaattgaaccctgggacagatggagacaggggtttgtgagatgaggctggagggtggccttggaccaggtcctgggaggaccttaaatgtgaccttgagaagtacagactttatcctaaaagccaatatccacccaaagtatatggtttagaatattgatcccattagctgtcccaaaataaaagggaatggaagatcatacggtctgaagtttaagaaatcctcaaaactacatatctgcttcttggaaatgtataatatacttttagcaggttaaaggctctggaaagttctgcagttttattttattttattttattttttttgagacagtctcactctgtcacccaggctggagtgcagtggcgcaatcttgactcactgtaacttccacctcccaggttcaagcgattcttgtgccttagcctcccgagtagctgggattacaggtgcacaccatcacgcctggctaatgtttgtatttttagtagagacggggtttcaccatgttgaccaggctggtctcaaactcctgacctcaagtgatccgcccgccccagcctcccaaagtgctgggattacagacatcagccactgcgcccggccttatattttttagttaataaatttaattttatttgttaaaaatgtttaaatttgcatttccaaaacttctttggctatgggaccattagccaaagaagttttagaaatggccaatttaaaattttagcayaaaattaaaatatatagcatatttatacctacctattctaaggagttgaattcaggaagtgctgctggaggggccaaggagccgctgtgggttttgagcaggtgggggcaggcttaggttctgttttagaaagtgacaccagcagtcgagaggataaagggagactggaggcagaggtttgaggaagcccccgaacagttcccgcaagacataatgaggatctaaaccacaggtttaaaatgtttccatgttttctttccattttacttcaagctgcattgttgtcttaaaattggaaaatcagtgctgctataataaatcatagcacaaggattttactcaggcataaaatctgaatgagaaagcaatctgcacagtcttccatcttcaaaagaagcgtttagcccaacagggtattgaaacacagtagccatctgtttctgcaaatctccagagttcatcgaggccttccaatcacacagacccagattcagggcccaggcccacacctttgtagctctatgaccctgagcaagtaggctttactgctctgtgcctcagcttccccatatagtacaaagaggaaataatacttttctcacaaaatagtttcaaaaattgaatgaggtgacatatacagagtgcctakcaaagtacctgactcgtgatgacataaaaataaatgtaattgcccttctgtattggccaggtccaataaggaacctctaaatctcagcagctcagtgcaacaagggtttattcctcactcacacaaaatccagctgtgaagccaggtggttctccagggcagccatcttccatgaggcaactctgtgttctggaccacaacacaaggcagcaggccaatcttgcaacaggtcttcagtgcttcagcccacaagagtcaaatgtcacttccacccacagcccattggccagacttagtcacatgatctcccacacccaccacctaattataaaaaagctgagaatatgcatgagcagatgggatgttggtggcatcagcctctaccactctctcttttctttggtcagttccttgagcctccctgagcctcaggttcctcctctgtaaattaggkctaatacttcctgtcctaccttgcatgggattattacaggagcacatgagattatatatgtgacaaatgctaaattrtagttagaggcagttatatgctcactgttttgctgtgccaaagctacctcacattctttggttcatagaaaaaaatgtacaacttcaactttccttaaatctgcattcctgttcttattcccccggccccatctttcctttggattggccactcccttctctcatttggctcttcccaattacttgtcgtgagatcattaaggtcacttatcagtagcctttggtagcctatttttggaatttcgcacaaggctgcatatcctmaaaggtcatgagggacgagatgacaaggaggtcactagagtatttctcctgggcagcagaggaaaatattgggggttctgaatcataggatgcatgggcccttaggtctttgaagaacaccaaagaggtgtgtgtttgtgcttgtgcatgtatrtgtgtgagaacatcatgtgcatgtgtgtgtgtgactattgcaagccccaaaattccataaatgtggacattaaccatgcaatctgccaagctccatgctgtggtttggctgccagataactaaggcaagttcaggaacagccccaggtgaacagggtgctaggcatgggaaggggacaactgtcttgccctactcagatccccttggaaacctatagttggctcagagggcacaactgctgtctctaacctcagaattgctgtgctaggccaggygcagtggctcatgcctgtaatcccagcactttggaagaccgagatgggtagatcacctgaggtcaggagttcaagaccagcctgaccaacatggggaaaccccatctctactaaaaatataaaaatcagccgggtgttgtggcatgcacgtgtaatctcagctactcaggaggctgaggcagaagaattacttgaacctaggaggtagaggttgcagtgagccaagatcacaccactgcactccagcctgggtgacagagcaagactctgtctcaaaaaaaaaaaaaaaaaaaaaaaaaagaattgctgtcctagagccaagggaagagccccagaggacagatcctgggacagtggaaaaagtccctgaagtatagatttcagctcaaaataaggaagaaagttcacacatttaagtccaatctaaccataaatgaactgggcttccttaggaggtagtgagtgtctcatcaccagaggtatgcaaagaaagactggacagtgggccgttggcagagactgtaccctaaggaagagatatgagagaagacacttgagtctcttcaagcccgaaagttgygtaaccctataaactagaataatgtaacctcagaagacttatatgtgtgtgcgtgtgtgtgtatatgtgtgtgtacaaagtttataggttcatttctatatatttgttgccagagggtatatgagagatgagttgagaacaggtttatagttataatgaaatcggagcatcctgagcatcactggtaactccgtcatcagaggaggattgcaggcaggcaagaacctggcccagaaaaatgagccccactgcagagcacagaaggagggatgcacactctctggtggcctgctgctacccaggtatccccacacaccgccagcagtggccacagcagccattacrcatcctgttttggaaaagtctttgcaacattgcacttttgtggctcccagtgcactcgcctctctgaatgacaacaggaaaatgaaatgagtatattgttctggaatgcactactctgtgtgtgtgtgtgtgtgtgtgtgtgtgtgtgtgtgtgtgtgtgtcggctctgtagtcttttgtcttactgtgctcttgcttcatactaagaacagccctcaaagcaggtgaccccagcatttctcagaggagaacccggggctcagggtgagcatgtcacagtcctggggccagaccctagttcaagtgcaaggcccatggctgtccgttacaccagggcactgcagtgtgcccaggctgcctttagccaaggacacactgtaaaatctaagatgtagcagggaacaggagaaggaacacttgaagttcatccaggcagcagcctgccttcctccgtgtgagctgggagtcccagaatcagccagagtcccagggaggagcatgaaaaaccgacagggccctgagcctgcagtcaagatgctcgaggttcagttgccctgaattcttgatgtgtgagcttgggtaagttccagcccactcctgggcttagtattctcctgcgcaaaatgtgagggaggctgatggccctactaacctcctagggtggttgggcagatctaatgaaactgaaaaccttgacattgagtgcacacactcagctgtagtagagtagaatagctctgtccgggatcccacgtggtacagagtcctgatttagagaatcttcgcactctagttctgtcacctctccattcacgccaagctgggcttggacttgacagcagggagtcaccatgaacagccaaccaggttgtgcactgagttctcagcagagccctgtgagaaggtgatgagagacacagcctctgyacggccatgccagggctgartgggaacagctcagctgcctcaaggtctargctgggaggwccaaggcctgggtgggagggatgccakcctggacgagractggagctggacagcttgggcagggccctctgggagctctactcactttaggggccacagatctgaccccaagcccaaggccaaccaccaccctctcccccacagagaggctccttggccagaggagtctggcccagggcaagatgcagctgggtggggcacttgaacaggcactcctaggccaggcaggaactatggggaagagggctgcccttgccagctcagggccacaatcaagtctaatttatggcagggctttccatcctctttcacatcacagcacacaatattagcacagcaccctggtgaccacagagcctgctcgtggctggcagtgcctggcctatccatgtgccccaaggcaggcggaggagagcactgtcgtggggcccttctacccagtcccgccacaccatgaccagggcacactgttggaagatctagattagtggtttagagaaaaggtttcaagaggagttaggcggacctgggttcaagtcacagttccactccccttcactcctgtgtaacgtggagcgggtcactcagccttacggagcctcgtttaatgtcccctaaaatggtgtggtgctggcgctcgtgtctgcggtggttgattgattgggtgaaatgggacagtgtatataacactcagcacagaatctggcccacagtgagcagttagtaaatgtgagggggtcagaggaagtacagatgacaggggtgggggcgatagcggaacaggaaagagtccaacacagatacctctaacacagactaagtcctcccgaaaaagacaggaaggaagatgttttgggcagtggatgtgggaggagcccagaggcctggaggaatggatgcgaacttcaccgtcctatgaagaagggtatcccagggcaaggaaaccccacaataagggcaccaggaggagagatgatggactgtgtcataggaggagagatgatggactgactcatggctgagactgggggatggggaacaaggctggacgggtatgggggggtcagatcatggagggggatgggagccaggatcatggggcccggatgtctttactgcagtctggggagtcactgaaggtcttggagsatggaattagcacggcgcggatgatcacttggaggcaacatagaggaggaatgggttgggaagagacaggagaccaggtcctgaccgagggcaagagcctggggcaggagggaaggcaaaggggagagaacttcacacaggtgcattyacctgcaygtgacaggcggctggatgttggagccagggtgggcattgaagaatgagaaaggctggagagacgccaggttctggtctcacctgggcagacagtgggctgctttctgagctagccaacccagaggaacagcaggtttaagggagaaggcaataaattcagactgggagaggctaggcaggagtagagggtgcccctggtgccccctctgggccagcccagagggcctggaagcagaggaccaaataggatcccctgcatctggccaccaagagttccctggaaatgatgggggagcaattcagcagaactaggctggagagcggtgggaggggaagatgatggatgggagtgtgaggactcctttttcaagaagcttgctgaaggggaagaaagaggggaccaagaggctgagaagcagaaagcagggaaggacgagtttcaggccagggctgggctgtggccctgggcaggggaagggggcaaaagcatgcaagagagaaggcaatcaaggaagcaagtaagggcaaggtgcttttctctctcagtcatttagtgccaagtataagccacacaactgtgctgtcgtcatgttcttactttatttcttctccgggtttaattgacagctgtcaggatcttactgtaccatgccatgtctgagggaccaggttcctcttcagctccttttgtctttctctgtctcctgtcatcattctccccatcgtctgcctgctgggtcagggtcctacagtggtccccaccgcccaccttggctctgcctgctgctggtaggtcaggcttgtccctggactacaggaggaaagcagggctccactctcaggacagaggtggttcagccactggttgcacccacgtgcactcccgggcaatgccaccctgatgacttctgccaggttggggcatgaggggtccaggctgccccatcctgctgagggtggggtacaggcaagagcccagcaaccaggcctgggagtgtctgctcttgtctagtgttgctaccatggaatcactgaatgtgggcatggagggggcctctgaggggaagggatttgcttgcctgaggtcagcaagcagaaacgtccactcaataatgtgccttcaacaaaaatcgggtgaccatgtgaatagtttcttgtcccacgtcagctgggacctcctgggtattgagatccaggaaatattgcctcagaccccccagggccgagtcctgggaaggtcctgagcctgctggagactcctgccctttcccaggcctttcctgtaggctccaggtcctgttcctgggtcacaaatgcaccagtggtccccttacccctcaagcagttcctgaattttattttatttatttatttattttgtattattatactttaagttttagggtacatgtgcacattgtgcaggttagttacatgcgtatacatgtgccatgctggtgtgctgcacccactaactcgtcatctagtattaagtatatctcccaatgctatccctcccccctccccccacaccacaacagtccccagagtgtgatgttccccttcctgtgtccatgtgatctcattgttcaattcccacctatgagtgagaatatgcggtgtttggttttttgttcttgcgatagtttactgagaatgatgacttccaatttcatccatgtccctacaaaggacatgaactcatcattttttaaggctgcacagtattccatggtgtatatgtgccacatttgcttaacccagtctatcgttgttggacatttgggttggttccaagtctttgctattgtgaataatgctgcaataaacatacgtgtgcatgtgtctttctagcagcatgatttatagtcctttgggtatatacccagtaatgggatggctgggtcaaatggtatttctagttctagatccctgaggaatcgccacactgacttccacagtggttgaactagtttacagtcccaccaacagtgtaaaagtgttcctatttctccacatcctctccagcacctgttgtttcctgactttttaatgatcgccattctaactggtgtgagatggtatctcattgtcgttttgatttgcatttctctgatggccagtgatggtgagcattttttcatgtgttttttggctgcacaaatgtcttcttttgagaagtgtctgttcatgtccttcgcccactttttgatggggttgtttgtttttttcttgtaaatttgtttgagttcattgtagattctggatattagccctttgtcagatgagtaggttgcgaaaattttctcccattttgtaggttgtctgttcactctgatggtagtttcttttgctgtgcagaagctctttagtttaattagatcccatttgtcaattttgtcttttgttgccattgcttttggtgttttagacatgaagtccttgcccatgcctatgtcctgaatcttactgcctagtaagattactgaattttagtagaacttcctgaaggtgaggaggagcaggccctttccacaagaggcatggctctcccagggggcatctcatctggctgccaaaacagctgctagttccaggttcttttctgcgcctgcgtttctccacctataagaagagaaactggatcaatgcagaaccccattcgtgtttggaaatggggagacgggagggagatcagggctgtcacagtgactagaggacattcatggcctttagtacgcggggtccaggggttctgtgcaccccacccagcacagaatagtccctcccaacaaataattgctctctgcatccccaaagaaaagtggctggaagtgcccatgttgagaaaccctggtgggtgatcttacatgtcctttccagatctctgattctggaaaaaaaaaaaaaatcacccaaacttgtaatcataacattctacaaaaaaaatgcttacttgaaatgacagcttctagctttgttgcctcagaggtgcggggctgctgctgtggagataagcagtccagcccctgagggatctggaaggttcctcccagctccagcgctctgtggctgtctgcagtgggggataataatgatgctttccacatcaggagcaggctttcccgtctctccagcttgcgagtcacaccgcacctcctttgatcatcttgccagccctgggaggttgtagatgaggaagttatggctcagagaggctgggagacatgtgcaaagtcacacagctggcaagaggtggacttgggatctgagtccagggccctttcccctccctgcctaggcatccttgttggcaccccaaaagaggccatgttgactcacctgccttcccaggaaaggagaaccatctcaaaactctgaaatgcagtctgggaaggccaaacacaccccctaatacacacacaccacacacacacacacacccccaacacacacacacacacacacacaaactcacatttacatgcacacctacactcacccccagcagaaaaacctaccaattttaccatatactttaaaaatcaactttggaatttgaaaaaagaaaagaggcaggtatggcccagggagaaagttctgyatgccaacttctgggagctggtcagaaggtggaaagcaccccctccctcaaaggagcactggccgggccgggctgggctgggcctaggaaccctttccacccacagtggtggcaggaataaaaggtccgagtgacccgcgccaagagccccgtgatcagaggtgaattgcgtggccctcctcatgtgcaccatctggactccccatcctccctgcctgggcctgttgcctcgcccacccctaaccgccctggccagccctgcacaggacrcacagaagcacatgattgtcaaggtctggtccagggtcagaaacatacagaggagccctgtcaagtctggccttgcgctaagtcatcactctgtgtcagaggtgtgcgggtgacaaagagaatctgcgttcttaaccagactgcttctaagctgagaaccaaatattaccctactgtttcaaatcctttaaggccttgctgcccaaagggtggcccctggatcagctcctcccctggaactgcttagaaatgcagcatcccaggccccacccgggaccgcgcacctgaatctgcattttaacaagctccccaggcactttgtgctcacattatcgagtgagaagccatgctgtcctctcgcttatcacacttcagcctctctggccacatgagggttcctcaaatatgctgatgtctttgcatttcaggttcttttcccttgccatgccttctgccatgcgtgctcttcccctagcttttcacatggctggcatttcttatctgccgggtctcagactaaatgtcaccactgcagagtagccatcccaggctacctgatctgaaacaacttccctcattagcacccctccaagtgcccgtagtttcctttaggaatatttatcactgtttgtattcataactgtactgtgtggtttgttgaatgcctgtgtttgttgagcagcccccgttccactggaatgtaccctccaagaaggcaagcgccatgttggtctcattcatcctgtacccccacaccaacatggtgcatgacacacagcaggcacatgacaaatcctcatggagtcgatttcgaatgaatgaatgtagracaaatacagtcatgaaatgyaggacagatagagtcatctcccaatgactcagactcccattaactacactgtaaatcaacccatgggctcccttcacaaatgggaaactgaggtctagaaaagggcagggatttgcccaagatcacccagcaagtctgtagcaggaccaaggcttttgacctttcaggcctcaacacctccacttatgctccaactccctgcctgtcagtttgtgcagccggacagagmgggatatttgcagggggcactgacctacattgtgagtaattgcattatgcagagggactctcgggccagctgctctccttttgccrcacagatgggagaggctttccccggcagcttctgcgtgcctcctgctgagcagcagcctgaccagaagtcaggtgtgagcacttccatcttctggccgtcccaaaccggtgtggcctcactgctggacacggtgccctgccaggcaggaaagagcattttatcagcctgagttcagctcgcagcaccaaagcgcagccttcaccctaaagctctgggggcttcaggggaagccactgttgaatatttaacgattaagttcttcctccytcaaataagcactttgcagtttatagagccggttacacccactgtctcctccgatttgacacaatgatgcacgtgagaggagggcacatcagggaaggctcatggtgaaggaggagggagtgctggtttgagartcacacacgcctgggtttaatctcagccccgagacttactagctggagatcttgggcaagttacttcacctctctgtgactctgtttcctcatctgtgaaataagtataacaccttgttggatttttgtgacttcaacaagatgacgggtgtagagttcccaacccagcartgagcacatcattgtcactcatgataaggcagctcttggtgtccttatggctgatgttatctggtgaagtcagccctctctctctgaggctgcctctcatgggaactgtcctggtcttactggaatgggagagccatgaggacagggctcttgtctatccaggttattgctgcatgcccagaacagtatctggcaaatggtagtgcttaacagttattcactgtatgaatgaatgaatgaatgatttcttaggcaattgccaaagagagcaacaagtaaggaagaaaaataacaaaagtggccgggtgcagcggctcacgtctgtaatcccagcactttgggaggctgaggcasgcagaccatctgaggttgggagttcgagaccagtctgaccaacatggagaaaccccgtctctaataaaaatacaaaaattagctgggcgtggtggcgcatgcctgtaatcccagctattcgggagcctgaggcaggagaatcgcttgaacccaggaggcagaggttgcagtgagctgagattgcgccattgcactccagcctgggcaacaagagtgaaactctgtctcgaaaaaaaaaaaaaagccagttgaaaattttgcaggccagctatccagagcaagaaaaacattctaagggcaatgcaaatgctgtcctgtacagaagagaagaggccgaagcccgggcttaggccctgaccctgatgtctgcaggggtcagtgccctgtgctcgctggccctggcctgcgtggacagtccacactgggaacaggccgagtgcagtgcccaagtatagcctgartacttccccaacagctgctccagaagtgggggagtcccccatggtgcttggaaatctggcctyatgtaaggccagtgggtgccttccagagtagcacaagatgctgctgacagcttcaccgtttccggccccaccgatctatagtagttggtagttctgtgtccccagcagagggtaatccaccaccaccaggctggacccttcatgtggctctttggtgccctctagtggtgctgctttggtgcacgacaatgacaaggaagcactgggggttggggggtgggtagcccacctgcccctgcaggttgcatgctcaggtgcatctctccccatgtgtggctgcacagaccactgcgaactccaggcccaggtagaatctggatggattagacaacacstacagcttgtacagtctgctttgtggttcagtgcaggagtcacttgattttcttccagatgcccattgccagcctcacaggaacaggaacatcatcactcccaaaactatcccaacccctgccaccgtaacctctgacctgtgacagggagatggggctgcatgaggaygacattagtgaccagaacatttttgcagtttatttctggatcagcacctgaatatggggaaggtgggtgtgggagcagctcggccaccccaggaccactgacttccatgaactctcagtggacccatcgtgtttgtttgctaccctcctgccaggactgtgcttaaggctgctgagatgggtgcggaactgaaaggccaaagataagaattcagatttcaagattccgagaggtcagagcggtgaaggtggggttgcgggggaaggggagcagctaagagaaaggtaaaggtagccaggctggaatgtcagcagcacagggggaaagactgggctagcagcagttctgtgaaaactacctgatgggtcttggtccaacctgaaggaacacatgaatcactggtggaagattatatagaaagccaaggagacccagagaaagaggtcaagctgacttgctcagcacttgacttgctcagcactgcctggagtactgagctccattcaaagcctgtaggagtggtaaatctgtagagcagtggtaaactccagcaggttgactgacaaggtggcctgggtggaggaaggcacagtggtgtgtcccctctctgtagatcttccctcctgtggaaggtgtgcagactcaaagagagagcttggaattattctggggaaccccaggggagagatgagccccggtgagtggaggtccaggaggagaaggctgtggctccgtgaaagcactgtgtactacctcaccgggagcaggagggaggggctccctgccactgcagtgtgtaagccaggcaagccttgtcagtttcctgtgaagagcacttcatcccattgagcaatgctgtatgacacaactaattttctccacaccgagaatctaagattccatcataaattactgctgttcattgtagaggaaaagacaggatcaccgttaatgggtttgccattcatgcataactggaatgggtccgtgctactgcattctgatgttggcctgattgtcacacactggagaaacccagattctgccactaagtcagttgaccttgggaccaagccagttctgtcaccttaattaaacaatgaaaggatgtcaggaaacccccattgcccttaataaaatgcagcccagctcctgggtgggtagcagtggaggggaaatctctacccctggccactctgactttagtttctggagatcacctccctccggggtgtttcttactgcagagccttcaggaaaccacattatcccctctagcactccagcccaagtgtggactcaatgcacatggacccaaagaggttgagctaaggctttctgtggcttgggacagcgaaaggcaaatcaagcctgagagaacacacagcaggatgatctggtcaaaaaatggcctgaacccccaggtcccacccctcctagctcctcctgctttcacgtgggagcaccatctttcccccasctcacagaagcccaggtccattgcctgcttcaaaggtcacacctggagagcaagaccaaaaaactagtttctaaacgctacccgtctaagacctgccttctacccctgggtcccatcaaagtaccttcttcctagtgattgaccctggggatgcccatgccttaccctcaggagtgtggctttaccctgggcctcaacagcacaactccatcagaatataacatcctgaacacagttatttggtgatatactcccagtggcaaacagattgcaaaggaatcttcaactttacttagtaagtttgtgcttgacagttgtatggatgtatcaattttgcaactatttagtgtctaatgtaggactgaacaaatcagtaaatattttgatgttgttcgaaggcagggattccactgttggagargagtgatgaaaatatggaatggggaaggcaagcaagaactcggcagtgttggatcttatctagacagacagacagacagatttatttttaaaagagcttagaagtagtgacaacttaggaacagtgagaccatcaagtgcctacatcttggtttctaaacaccattctccactaaaaagaacaaggactccttggagaaatggttgattgcaaggctgggagcaagaagagttcaaggagtgctggaatcgttgtgccaagaagtaagaaagtgctcaaaaaaattatggtgatgtgtggaaaaaacatagaaggcagcatgaagttgttttccactggcccaatctggaaaaatttaagcatcaacatgaataagatagcaaaggattataagacattgaattaaaaaggaacatactaggccagacatggtggcccatgcctgtaatcccagccctttgggaggcggagacgggcagatcacctaaggtcrgcagctcaagaccggcctggccarcatggtgaaaccccatctctaataaaaatacaaaaattagccaggcatggtggcggccgcctataatcccagctactcaagaggctgagacatgagaattgcttgaactcaggaggcagaagttgcagtgagcggagatcacgacattgcactccagcctgggtgacagagactctatctcaaaaaaaaggaacatactgatatacataaataaatgggaggaaaggaaagctcttctttgcagtagaatgccaagtgtttaaatagaatggtagagttagaaaatcaccattttgcagctaccaaagtaataaatgactcaggtaagaattatcaatggttgctgaaaccactgcgtgaacrtttgtgggggaacaggatacttacacagtctcaaagtagctcccacagattatttattaattacaaatggggaaatgatacctttgaaatggatgtctgacagaaatcatgtcaaccaagtgatcacagagtgccaacgcgtccccctgatgtgactcttacttatgtagkattcctgacaagaatacataaaatctgaatataaaacattcaggctaatccaaattgagggrcttctacaaaataactgaactagatttttcagaaacaatgacatgaaagaccaaagtaggctgaagaattgtttgagattaaaggaaaccaaagacacgtaagtgcaataatgatgctggattggatcctgcattggaaaatccacagttgctttaaaggacgttattaagccaattggcaaaatctgaaaatggctagtatattagataatacactgtatcagtgttaaattttctgaatttagtaagtgtatgtgattgtgcaagggaatcccttgttcttaggaaatatatgctaggatattcaggggtgaagggtcaggatatctgcaatttactctcaaatggttcagaaaaaaataaatgtacagtagatgttgtttcattccctgggtgtctttttgtcttgttgccaccatctggccaattatctcccagagtttcccaattcaagttcctgccagagagaatgtgctcaggagggatcctctccatcaaccctcattaggcagagcactttgtaggaggaaacctcataggtatctgacaagcctctggattggctgcctggggtcaggtgcccattctttgtccagtcagctctggccaaggatgagtcatgtggtacacaacctggctgccatcactgctccagcagtggggctgtgggcaagagggtctcctcagaagggtttggcaggccccaggcttgggcaggccagtatatcctatatctccagttgcacagaggtaaccccagaratacctgaagacctcctgacctaactttatacctcattctcacaacaaatattagcggtacctgcattgggccaggttttgtgttagatcctaggggcaaagaagtgacccagttcctaccctcaggagctctgactcaaattggagaggcatgaattatgcagagaactggagtgcagggttgaattgctaccaacaaacagaaggcagtcaacgctagttgaggcctgggctccacaccttaggaacacagagatggggtccaaatggcctgctgaacagtggcattggctatggctcacaggagggaaaagggctctcagataaggacccagttgctggaagagtgtcctgtgccatccctgagtctctgttttctctttgcacagccggacccagcaggacgggatatctccatccgccctctcctggagcactgtgagaacacccatatgaccatctggcttggcatcgtctatgcctacaagggacttctcatggtaggtgcagagcaggagacagtgttgaggggggacactwctttgttgggcctctgtctcccaggggcctccatcaatgtaaaaataaacagagcctccatgactaagcagttactctctgtggactcagtgcctgccacatgctatctcagttcctgcagcaaccctatgagataggtacaaataacatcctcatttcactgatgacactgaggcttggtgtcttgcccaaggtcatctggctagtaagtggcagagtcaagatcttaaccagagagtaacccaaaaactcgtggctgtgccttacagctgtcactgcactactcccaggaagagcagtctgccgacatccagtgcatgttcatgtccagcatttcagcggaccctctcttaagtccatgggaggtgggcaggatcatccccatwtaatagatgaggagggtaagcctcagagaggttaaatgatttgccaaaagctgcctagtaacctccaaactgcaaacccagcactctttccactttactcatcttttgaaatcaaagatcatgctaggtgctgtggctcatgcttgcaatgccagcactttgagaggccgaggtgggtgggtcacctgaggtcaggagttcgagaccagcctgaccaacgtggcaaaaccccatctctactaaaaatacaaaattagctrggtgtggttgtgggcgcctgtaatcccaattactttggaggctgaggcaggagaatcgcttgaacccgggaggcagaggttgcggtgggccgagatcaggccattgcactccagcctgggcaacaagagcgaaactccgtctcaaaaaaaaaaatcaaagatcacataccaagcccacgttgtgaaattccaacattaggaagaacttgaaaggtcagctccaccatatttcagcccaggttgatccttgaatcttctctcctatatcctatataaaccatgcttccactgaaagccatctagtgacacaaagctggtcactgcgccctcctcagatctttccacagggaggttaagtcaccattcacccccgtttgaccccacttagaggccaaaaatgaagccctctctccaaaagtcaaataaactggaatctcttgtgctgctcaaatgcattcttacctgctgctgcatcactgaagtgttagtgattgatcctgtgtcctttgagaggccatgccagaagggcatgtaagaggaccctagacaaagattggtccccacttcataccagttgacacccttttatggttttccatagaagtcttttgagctcccatgcaagcaacaggaccactgggctgcaatctgagcacaaggtaatgaccctgggggtgtccacrggaggtacccaatatagaaataggaacttgaggactggccaaaggtcctgggtttggacaaggacacactcatagtcaccagaaacttggaagagctctcagcaatgggtggcacagacctgagggcagaaccgtcagccccaagcaaagttgctggaaggcagactccatctccatgtaaagatggattcttgtaacaggcagccctgtccatagatgccatggagcccctaagaaggacaagctccctgtcatgggaaagcatgtcatgtyaatgacctgtgcctccctgaccctggttgaatagagagaatctagactgtctccgtgatccttccatccttaatgttccttgattctgagactcattccgtgaaaatagattacgatgaatcatattgrcatctttaaactggatttatttgtaatgttttgatcattcattrtcttctcccacctacttccaaagtggttggagatgagaartgactgtatgtcttcccgtgaagctaacagcttcagccagctcatgtcaacaaaagctatatttaatagcacaaatgcttcaccatttagaacatgcaaggaactgtccccagcctcctggcccttaaggtttatgactaaaatcccactgccatccccctaatccttctattttagagccacagaatctcaaggctgggagaagcacacacagccctttgggtccaccccactgccagatgttttggccccaatccccagcccaccctgagcatcccccaaagcattcattgactaactgcttctatacctccagtgatggggcgctcgccctcttcaaaggagcctgtgccattcgtggatgatgtgttcgtttcctttggctgtcataacaaattaccacaaaacagtggcttacaaaacaaacagaartgtattctttcctagttgtggaggccagaggtccaaaatccagacagacacttgtggtccctctgaaggctccaggagagaatccgtccttgcctcttccggcacctgatggttccaggcatgccttggcttgtgaccgcatgactctagtttctgcctcygtctccacatggccttctcttcttctccccaagggtctcctttgtgtgtccyttataaggacacttatcattggatttggggtccttccagataatccaggatgatctcatctcaagatccttcattatatctgcaaataccctttttccaaataaggtcacattcacggtttccaggaattaagatatggacatatcttttagagtcaccattcaacccacagatggagtgcttttctagaaagttcttcctaatcctcagcggaaatcttcctcagtgtaacttgtgcccatgaaccctcattctactttttgagggcctaagaacaagttactttgtgtttcctcctgacactctttagagatttacagccaaccaccaggtccccagagtagcccacatttattgtggagaccttcacagtggcttggtggcccatcagtagcatggctgataggatctctgctcactgcaacctccgcctcctgggttcaagcgattctcctgcctcagcctcccaagtagctaaaattacaggcatgcaccaccatgcccagctaatttttatatttttagtagagttggggtttcaccaccttgcccaggctggtctcaaactcgtgacctcagataatccacctgccttggcctcccaaagtgctgggattacaggtgtgagccaccatgcctagcctggttccccattttaaaaggaattttttaaaaggaataaatcaggctgtgagataacacatttagagaaaggataaaagacaagggagaggaaaacaatcatgcttgtataaaataagatcaattacaaatagctttgaaattaccttggtacagaacatttcagtctacagagtgctttgacatccatcctcccatttcatccacacacaaaccctgtgacatagatattattattattattattcccagtccacagacgttgaaagtaaggtcctgagaggtgaagtgacttgcccaggtcacccagccaacagatggcagagcagattccatatcccctggccttgtgtccagccctgcttctaccacacagcgttatgctgccatcgaatctctaaacacaggtcctcagtgtgatgttaaatggttcatgcagctgtcagacgcctgaagctgccctgctgaagccgaagggaagaggggcctttgtgagagagaaggcctcttggaggggctgcactaaagcagaggtccctgtaccagtcagccatcttggctcttcctcctgcccaccacaccaccattctgccctacacccacctgagctgtccctgcagcccgccctccccttagaccacccataagggttaaaccctcgacaccctgcttcagatcatagttggcctctaccctgtccatttctgtcaagacatctattggttaggagtagagctgcaagtcacagaaaaacccaaaataataatggttgaagagacaggaaatgttcctctcaggtaaacctagtccagaggtaagcagtctagggctggggtaaggctcccagaatctcagttccttgcatcttgcagcccccacatcatcattacacaggttccacgtcatagccttgtgatctaagayggatgctgaagctccacccatcacattccactccagctgttaggaaggaggaaaagcaacacctcttccctttaaagacacttcccagaacatgtgcacaccacttctatttacaggcattgtccagaagctagcaatatgccacgcctagcctctagggcagctgaaaaatgtagtcgctattctgggtgtctgtgtgtgcttggggacaatagaagtctcagacacaagggatctgcttagtttaatagaaaaaagactggagtgaatttctaaaaacacagcccatttttgctaccatattgctgtgcggccttgggcagacctcttcacccttctggatmttagtattccctagagagtgagggagaaagctgagatcttatctgaagttcccttccactgtagccttgggcaggtctgtgcatgaaccagtcataggggtgcaggagaactggacagctgtcacatccccagtctgcatttgctcagcaggactcagcagggccacaagtggggacagatggtgacatccagaagacccggctgacagcaaggcccccgaccctccctccctgcagcccacctcctgagtaaccctccactccacagcttctcagagcagcctgtgtgtgccaccccttggtaacgatcatctctcycctttctgttcaccatttcagttgttcggttgtttcttagcttgggagacccgcaacgtcagcatcccygcactcaacgacagcaagtacatcgggatgagtgtctacaacgtggggatcatgtgcatcatcggggccgctgtctccttcctgacccgggaccagcccaatgtgcagttctgcatcgtggctctggtcatcatcttctgcagcaccatcaccctctgcctggtattcgtgccgaaggtacaggcgctggccccaccacctggcctctgccctctgactccagcacaggggcattgctggcttttctccattctctaaaaggtttacccattcctttttttttttatgatgaagacaattcacattatagaaaattcaraaaatgcacagtagtaaaggccaggtttttcagaaatttcccatagtcccaccacccaaaaatcatcactggtcatgttttgttggggtgttctttactgttaatgtttttgatgtgtttccttccagcctttttcttaatggctaggagatgatgccttttttttttttccctcactctgccacccaggctggagtgcagtgatgtgatctctcggctcactgcaacctcaacctcccggaatcgagcaattctcctgcctcaacctaccaagtagctgggactacaggcttgcaccaccacgcctggctaatttttaaattttttatagagacggggtctccctatgttgcccaagctggtcttggactcctgggctcaagcgatcctccggycttggcctcccaaagtgctgagattacaggcatgagccacctcgcccagcctatggtgatactttttaagatatggccataactatagcacacattttgttctttgcttaatgttttgtcctttgtattttcccacattcataactgtcattgagggaatttccttaatttacttgcccacttgatcttatattggtgagcattggattttagaaatgaacattttttctgcataacacagtttccttttttccaattattcctttaatgtggaatcacagaagtagtattgttgggtccaaaaaaataactgtttttagtagccacttatatgttccatttatttgaagggctgacctttaggaccaccttgaagagaaatttttcgaacatcatcctaccttgcaatgggtgggtgagccagaggcctttcttcttaggagtccctgcagtagggtgatctgtgttgagggaagcctgacctaagtgagtctcaaaagtaaaggaaggtggccaggcatggtggctcgtgcctgtaatcccagcactttgggagaccaaggaaggaggatcacttgaggctaggagttcaagaccagcctgagcaacatggtgacaccctgtctctactaaaaatacaaaaaaaaagccaggtgtggtggtacacacctgtagtcccggctactcaggaggctgaagtaggaagatcacttgagcctggaggagcagaggttgtggtgagctaagattgcgccattgcactctagccttggtgacagagtgagaccctttacccgcccctccaaaaaaggaaagaacaggacacagagttgcaaagctgggaggggttactgacccaagtgggaggcatctgcctcagagcaggggagaggaaagatcatctgggtccatttcagcaaacaggctacccatggtgcctccatcctcctggrcatgcagtcagcccccaggcactgtgagctctgcactggaatacctctggtgtacacaccttagtcgtccacacctgcccagcctaaagggcaacaccgtgacttctctgcctgcactctgacattctttccatcctgtaaaagaggccagatgattctctaagccaagcttcaattgcggcactctgctctgttacgcccaatagctccccattgtcctcctggctctaggatcaggtttctgatgttgggctggctctcaggacccttgggtctcctctagtctccccagagaaccctgtccaccacccagcctgcccttccccttccatttmccccaggcctccctgcgttgccagacaccagttcttcccttggagttcccttcccccsaccatccctccagaccgccctcaaagcccagcaggccatggcactgtggtaggctgtccctgatacccgctggcctggtgaagattgagtccttccttcatccccatcccacgcctctggaccatgaagtcccaatgggcaggggccatgggtcactcagctcctgctttccagagctgagcccagagcctgcttcgaccggagatgtttctagaataagcgggtaagggtcaagtggcaactttttgttttctatacaaaatgttttggatgtagctaagcaatgcccagacccctgactcacggaaactgtgagataataaccatgtgttgttttaagctgctaaaaaacaagcttttgtcagtgacagagcttgttactagcctgcttccagaactcatcaatggtttaacagaggccttcgctctcctctgtctctttgttgtcacaactgttgccctcggggcttattttttccacaaggagcaaggcctaaggcagcgtgctaggcagctggagtgaggcctcgggggccctggttgggatgcaggtggcatcagggtcaggagactagactcttagtgaccaggaaggacatggaggcttggtgaggggarggggcctgccccaggtcacacacaagcragtagcagagtctggcctgagcctaggtctcctgactcccagcctgtggctttcctggggcctcttrtcgcctccagagcaggatctgctgggagagtctgccatgtgggatgggaggaaggactcaaggctctctcttcaaccccgccccaacctttgtcctttcagctcatcaccctgagaacaaacccagatgcagcaacgcagaacaggcgattccagttcactcagaatcagaagaaagaagattctaaaacgtccacctcggtcaccagtgtgaaccaagccagcacatcccgcctggagggcctacagtcagaaaaccatcgcctgcgaatgaagatcacagaggtacctccctctgcatctrgtagctgggccctgtctgccactgaagcccctctaaccctgtgcggggactctcaggctcctctagaccatccctgcagcatgaccgtgcagtctcatcagctgcagttgcagctgcgagagccaggggtgacataaaccacacagaggcatttgtcagaatccaacatgagcttattgcccacytcacccaggctcttggaggccagcaacacctgattcaagccatccccagacagaaaggaactcagggagatttgtgagcttctggattatcatagcttcctacgtcmgtgtctctttatctgtgtctctctccctctcagtttttcactctcccagcacaacccagcaaccaccacatctatgtgatgtacaagagaagagaaagtgaaaagaaacttttcaagagagagtgctgcagcagacctcgcctttgtcctgagggttctcaactggttcttgaatattccagagagaccatagccagattgccttgtgcccaagccaggcttggcttgtagaccagggaagggaaaacaaattacctcccctcctctacccctccctttgggttggaggtatgcctgaacccgtgctctgcaggctgtgtgttgctttaatagaggaattctgattagggagggggacaggaaagggaccaaggaaagtacattggttacaatgctggctaaacaaggccccaaaataaagtggcccagagaaaatatgtttatttcccttttacctaatggccgtgaaaagagagggcccggttggggcagctctgctccccaaggtcattgctgggcttggttcctgccctctggttttccccactctccagggtgttctcttcattcatagcgggagagctgggtggacagcatgtcctgttcacagtgtcaggaggggaagagatagaaagtccacrtgagggattgccttttaagcagtaacaccaaaaattgtgcatattttggttctgccctagtcacatcaacaaaaactgacatgagcacacctagtgagagragaggctgggaaacgtcgtctctakctggacagctgcaaggaagaagtgagacatakggttgccagattagatatgggatgcccagttaaattcagacttcagatcaacaaccaatcatattttcagtaaaagtttagcccaagtaatacttgaatatacttatactaaaaaagaacccattatctgaaactcaaatttgactggacattctggatttttatttgctagatctggccgccctttggrgggctcacagaattctgccacagagagccaccatacagttgtctgtgcacctaaagatgactgctttaggatgaggtaacccaccatcagctgccagagcaaactaagaagggtttctgtcccccaaagcccattacaggctctgtttcaatatcagacctctcctgatgagtacgaccatgtcactgcatttcacttctacttgcacacttcagcaatgaagagttcagtcacattaggaaacccaggccactatttaaaactcttaaatgttgtgttatttttcccggaaatgaatcacaatctggcctcctgttgtccccaccctttgatcctactcctgccatttaagtcacatagaaaagagtatctctttccctcctcctccacatgaaaacgtgttaaacaatttcatggctgtgttcctgwcatcagaacagcctctgatagtttatcaggtctcctcccttatactacagcaggatgctgtttggaaaaatcctctaaccatgtttttcctgtgctcttgcaccaacacaacagtcaacgcagaagacttctgtgaccaaatgtgtgtggggttttccccaccaacgagcagcaggcacccgctgggtgcctccagttcaaatccaatgctacatatctagagatagcttcagatcccacaggttgagggctcagtccccaaggctccccctgacccccaccctaccctcagataccagtcataagtcaggcctctggaacttctgaccagccagcttcaagttgggactcccaggatcctgctttgggttgaattaatttgctagaggggctcacggaacccagggaaacacatttaccagcttattaccaaggacatgaatgaagagatgcacagagcgaggacgggtgaaggggtgtggagcttccctgcctccctgggccccatgctccaggaaccttcacgtgttcagctacccagaagatcttcataccctgttcttttgagtttttatggaggcttcattacacgaggcatgactgacaactgtgtagaaatgtgattggacaaaaatgcatgatctaaacccagcaaggcctttctgctcagaattttcttggcctctctgtagcattccttcctccagggtatggggcaagactytctctctgtgataaaggtcttttgacctacatcagattacagtcctgccttgagcaggtgagaaaggacaggagaaggtcagagagagtgattctgtttcatgaggcccgctcctgaggcctraaatgccccaacattataacaaaagactcttacaagagatatagcagccaggaatcatggatgaaagccattctattatacagatatggtaatatcacagatgttcaacacccatcccgactaccacccccaacaactaccaacactcatattgcccaggcttctctggggctgaattgcccccaggacttgcacctgatttttgtataacctgggaatgggccaggtgctgtggctcacacctgtaatcccaacgctttgggaggacaaagtgggaggatcgctcgagcccaggagttcaagaccggcctgggcaacatagagaagacttgtctctaaaaataaaaacgtggggatgactgggacccatcctgattaactcctctgagtgagaccctgcaggtcagagtctccatgatagtgtgaggctcagagctcgcgagccctgcatgtctgtcctccactgtgggtcctattaagtatcagtaatagtaattataaggccaggcacagtagttcatgcctgtaaacccagcactttgggaggccaaagtgggaggattgcttgagctcaggagttcaagaccagcctgaggaacatagagagaccccatctctaccaaaaaaaaaaaaaattagccagacatggtagcatgcacgtgtagtcccagctactcaggagggtgagacaggaggattgcttgagcctaggagatcaaggttgcagtaagctataattgcaccactgcactctaatctgggtgacagagtgagaccctgtaataatagtaatattattatagtagcaagttgcccttattatgtttcagacactgggctaaactttccatgtattatcttgtttgatctgcacaacctccccctgaggtaggtactattattaccccattctacagaaaaagaaattgagactgggttctcacaagccagaagaacatcactgcaagtaaggggcagccttgggtttgcataagkcctgtccagagcctkagctcgtatgctctccctgcccttcctccctgagcttgcttgtctgcttcatcaaggcccaagcctacactgaacacataattgcaaagcccaggtccctcttatcatagcttctccttgaacaaagagccgccaggatccttctgcatctcctcaccaaaatgcagtaacccctctgattctcagggcactcctgaatacaggtaaaggcccagccctgtgagctaccttttggccctagtggcctagctgccagggctgggccagggasctgactcaactggaacctttgtcttstagctggataaagacttggaagaggtcaccatgcagctgcaggacacaccagaaaagaccacctacattaaacagaaccactaccaagagctcaatgacatcctcaacctgggaaacttcactgagagcacaggtaagagagccagggccccagaatgtggtagggaccttggtttcaaacaccagctgttcatcttcyattttttagatgaagaaactgaggctcagacagggcacaggactggtatgaagtcacrcacacagagctgragcatctggaacctctgtctgctgaccacagttcagtgtccgctttgagccccaccctgcctgggcctgggtcttcgatttctcatccctcggcttgcagttccacacctacacagtggggccagcattcccagtgtcctgactgggggcaggcacattttattttcccttttgttcttagcgaatagtttaccctttcttctctgaacgatatttcacagtttcaaacacacctcatcaatgtgcaagaaaagaatggtcagttagttatgatagaatgcttaatctcaccacccacttgggaattgcaagctacaataacacaaacctgccaggtgcaatggctcatgcctgtaatcccagcattttgggaggccaaggctagagaatctctttgagtccaggaatttgagatcagcctggacagcatagcaagaccccatctctacaaaaataaatttaaaaaaaaccacaaaccatttttgcctaccttttagaaaaaaaattttaaaggttaccagagttggtaagagtatttggaaatgagcattctcctgcaatgcattagaagtcagtctagcactgtctaaatgctccatgttaaacctcttgacctggcagttctactagcaggaacctgccccttgcaaatactcccaggtgtgcagagatgaacacagagatgttcatcacagtgctgtctgtaggtgagaaaaactgcagttaacttaaatgttcattatttgggggtggtttcattaattaagatatagcaaaacatggcacattttatagctattaaaaagtgaggtgggtctacttgtgcagatatggaaagatctccaggtgaaaaaagcaagatgaaagccaacattatgattatgggacacacaaatgcatacaygtgtgtgtgaatgcattttttaaaaggtttagaaaaacaaacaccaaattgctaacagtattcactcgtgtgaaaagaaatggtattgtggaaagtgagtgagaagggactattttacattacttttttttttttttttttaagatggagtctcactctgtcacccaggctggagtgcagtggcatgattccagctcactgcaaccttctcactggagaattctcactggagaattgttcaagcaattctcctacctcagcctccttagtagctgggattacaggtgcccaccaccacacccagctaatttttttttttttttagtagagacagggtttcaccrtgttggccaggctggtctggaactcctgacctcaagtgattcgcctgcctcagcctcccaaagtgctgggattataggcatgagccaccacgcctggccacattaccttttttgtatttctctatggcttggatttttccattagcatgtattcatcaatttgttataatattattttaaatcaatgaaaaatctttattttatttatttattttttatttttttgagacggggtttcgctcttgttgcccaggctggagtgcaatggcacgatctcggctcactgcaacctccacctcccaagttcaagcaattcttctgcctcagcctcctgagtagctgggattacaggtgcctgccactgcacccagmtaatttttgtgtacttttagtagagacggggtttcaccatgttggccaggctggtctcgaactcctgacctcaggtgatccacccacctcagcctcccaaagtactgggattacaggcataagccaccatgcctggccttttattctgattatataagtagtaagtggtcttattacagtagcaatattctataattaatattatataacatggttattgcaaaaacgtttaaattgagatarcaaggaaattacaagaataaaaattacttctaataactttcgtatctggtaaaagtgggcattttaaatttgtgggaaaaatgaattattcaataaatttcattgggataaatgggtaggcatctggaggagaataaggtagatcctaaactcacacctacacaaaaattaattccaatgaataaaatatttaaatataaaaaatgaaaacatgaaagtactagaagaaaccaaagtaaaatttttaaaaaataatctcagagagtggaggacctgtctcagtttgatgcaaaacagaaatcayaaaaggaaaggttgataaatttaggtacaaaaagaatttctttcataatgcaaaagccatgataagtacagtcaaaaaaatcaaacaaagccaaaaattaactcagataacaagcttatgcccttatatataaggagaaatgatgtgtaacaatacaaaaagtatgtataattatataccaattagtaagaaaaagaccaacatctcaaaagaaaaatgagcaaaagagagttctcataaaaggaactggaaattgttcttacacttatgaaaagatgatcaatctcattccttattaaaggaatgcaaattaaatctgcaatgagataccatttttgcctcaaagactggcgaagatcagagatcaaaaagctgctcagagtgccaggcaacaggttataagagaggcattctcaaatgctgctggttgaaacagaaatcattcagacccagcaatcccacttttgggatttgttctccatgccttagtctgtttgtgctgctgtaacacaatactgcagacttggtaatttataaacaacagaaatgtatttcttacagttctggaggctggggagtcctaaatcaaggtgccagtaggttcagtgtctgaggagggtccagcctccacttctgagatggcacctggattgctgcatcctctggaggggaggaactctacatcttcatgtggcagaaggagtggaaggggtaaacccactttctcaagcccttttgtaagggccctaacctcatccatgcgggctccgccttcacgacttaattacctcctaaaggccccacctcttacactatcacattggtcattcagtttcaacacatgaatttggggggacacattcagaccatagcagtatggatatacagtcgattctgctgattcaccgtagcggtagttatgttctttctgtaaagcctccatcaacagtggattgtgaatactgaaccattgctcctatacaggattagttcctgggaatctctcacaggctgacatcacaagctgacatttttgtccaccaatcaatatataattttgttgtatgcatgtttctctttaaagacatcttatttaggctgagcacagtggctcaagcctgtaatcccagcactttgggaggccaaagtgggcggatcacgaggtcaagagatcgagaccatcctggccaacatggtgaaaccctgtctccactgaaaatacaaaaattagccgggcatggtagcacgtgcctgtagtcccagctacttgggaggctgaggcaggagaatcacatgaacctgggaggcggaggttgcagtgagcccaagatggcaccacggcactcctcctggagacagagtgagactccgtctcaaaaaaaaagacatctcatttaatatatatggtttaattagcattgcactcacagccaacagcactatagctcatgcctgatggaagcttatctaactcatgtattttctctccataaggcacatcacagccctcttgtgcttagggacactagccagcacttcagcgctgtgcttgggggccattttaaacagcaaactcaccaacacacagcacaaaatgtgaaaaacatgtcactaaataaccttcaggaagatacttatttacaatataaaagctaagcgctaaggcagtgcatcaccttgctcaacctcagctgggaacacgtgcatcatgcaactcacattttcccacaccgtgcatgtcagcaaatgaccacaaaagcattgaaatattgatttggggattacaaataaattttagtcagaagaagagttcgcaaatacaaaattcatgaataatgaggatcaactgtacacacgtaggtgcaaaatgacatacatataaggttgcccactggagcaaaaacaaagacccctccagaccacatgaatccaaatctcgggtgggaacctgatttttatatttctttaaatctccttgtatggtcctgaagcacagagagagttgagagaatttgaatcacatattttgtggctacacaatattattttgaatggaggtcctataacttctgtaactaatccattattaccaaattcagatgagttccaacattttaatattataaatgatgctgaggttgtggctgggcgcagcggctcacacctgtaatcctagcactttgggagactaaggcagttggatcacctgaggtcaggagttcgagaccaccctgaccaatatggtgaaaccccatctctactacaaatacaaaaaattagctgggcatggtggcatgygcctgtagtcctagctgcttggagctgacacaggagaattgcttgaacctgggaggtggaagttgcagtgagccaagataatgccactggtggcacgatctgagtgacagaaaaaaaaaaaaaagatgccgaggttgaacatcttgtatatatctttgcacagatccttaattatttccttaggataatttygagaagtggaaattscgggtaaaaaataggtccttttatggtgtttgacacagatcagcagtgcccccagtaagattatgtccatttattctcccaccagcagtttactgactattctttttctttgcaatctttgctgctctatgaaaaatataccttggaggttttttctttgtcttacatccctatgtgcctgtgaaaaagaatgttagaacctcttgtttctaagttatgtttcctacattagtcgacttgattttcccctttttgttcttggaaaggagagcgtggggcatgccacacacatccccagcacattgcttccatccctgactgctggaggcttctcagctcaccgccttggtcccgggagagccactacacagacctcagcttagagaacacagagggataatgggctcttttgcattctgtctcttggggcatcatcctacaaaaagttgcattgttgatttttaaaaactaagttaaccgaacatgttgtggtattgttgttttgcattcagatggaggaaaggccattttaaaaaatcacctcgatcaaaatccccagctacagtggaacacarcagagccctctcgracatgcaaagatcctatagaagatataaactctccagaacagtaagtaccttctccttgagaattataactgaagaagaaatacgtcactcctgcacamgagtttgcaatttgcacgatgttttcacatccattattttatttgctttccacagccatcccatgatgcagtccaattacagtgctctttttacagatgaaaaactaatattcaaaaaggggaggtgacttgccaaaggtcactcaattgctacatgcaggaagtaggacttgaactcacatctttccaacatcaaatcccatgttgtctaccacaagacgctgcctttgttatgtgtaaaatttaaccttgctaaatgcatttacttaacagtttactgagacctcctgtatgtcaggcataggtgctagggttacagcggtgaagaaaacggactaaaattcctatcttcatagagcttccattctatctaggaggctgatagcttaattaaaaagcaagaagtggcatgtcaaacaataggagctttggaggaaaagcacagaagggggtcagggagtgtcattttaaatagggtggtcagagaagactcaatgagatggtgacatcaaagcaaagacctgaacatctctgttagctttgttcccacaggcaattttaggccttcccatcttatagcacattggaagcagaagctggaaatacaaactttgaaacttggcctctggaagtgacaagcaatgaggaaccagcaaaagcagccaaatcaccaattgcagcatcatttggggctctttagtattagagctaagggcctgtcaacccaactagctccaaggcctggccagcttacagtccaggacagtgagtgagagttacatggaatttgtcagcagtttgcctagcagttgcctccagtagagtgtaagcaccttgagagtaagttatgagtcyttcatgtgtcccctgcaccgaacacaggttctgccagtgaataggttcttgacaagcatttgttgaatgaatgaaaggtgaacaggatcctaacagacagaagaatgctctgacaaccacaggacccaccttgcctaggcagatagccctgccctgggtgcttggacaggacacccttttcccaggtcacagtttattcttccctttttgtcctggacttcttgccagcatgatcttgccttaagacacagacttcagctgacattatacaggtccaactttaacttcagaatgagatctccaacactgtagttccatgcacacctgtgaggtgtctcttgggaggaatctttctggaaagtgtgggcagcacttcgtctgtacccatctatctcagaacccaccagtgacctaaatgaaccccaagggcacacccagttgggataaggctgcccccatgagttgattcgcctccaccacaaaacaatgtggttgaacagaagcagcaagaattccarcttccccagttctggttttgtttccatggggaagttacctgaactctgtactcttccctcttctttataatgggaatagcagtatttcttttgcctattgggtgtctgttaagctctggggtttttgtttttcgcttttttgcacgtgagtggccaggcactgggaacacaagaaggcataagaactcagtcccttctctcaaggaatgcggtgtgaaagttgcacccatggagaactgtgcaagaatgcagctgagccgagcagaggagcagtcacctgggcacatttgccgcaagcagccttttcaacaaagtgacatgacagtcattaagaccagaagggtgtggcaatgagaagggagtcagagggcagctcccttttcccttgctgctcctccatcacgtgctaacccacacccagctccatcttgcctccagctttttctggcttcatttctgagtatttacctagggttctgcttagcagaggaagggttctcctagcagagagtgagcacaaacaaggtgatatttaaactggatcttgaaggagacacagttcatcatgtcaggaagcagagaaagagtcttccagacagggaaacagcagaagagcacccaggagcagggtttccagggaaactggctgccagagggcagggcttacaggtggaaaggatggaagattcacctggaaaattctgatccaaagatggaacttagggggccccaaatatcacatcagtgtccctttttttcccttccttggcttcctagtgttggaaagataacactagttaccaaagaagctggaagagcctgtgggaattggcccagcaagaagagatgcggtcctgggcaaagcagaggcagacgggagagaggaaggatggagcaggcgagaagtctttcagggatgaaactgaaagccctgtggaggtttgcaagagtagagaatgcgaactatctggtttgcagcaaagccctgatagaaaggcaaagctttgtccttagtaatacagacagtccccaacttaccatttttcaamtttacaatggtgtgaaagtgatacacattcagtacagtattcagtaaattgcatgagatatttaacacttttttataaaataggccttgtgttagatgatatggcccaactgtaagtgttctgagcacatttaaggtaggcgaggctcagctaggatatttggtaggttaggtggattaaatgcatttttcaacttacgatattttcaacttacaatgggtttatgggaatgtaaccccatcgtaagtcaaggagcatcttttctgctagggtatttataataaccaccaaatcctggcccaaagctcgagaaaattcatctcccttgtttattcaagtctccctggtcattcccagggcagtagctggtacatatgggccctcattaaatacctgctggattgctgaatggttagatgattggatggacagatcttggattcagagaaaaatatgctcctgtyatcagcttttttagccaaagcaagtccaaggaactytctggtaagcscccagctacccttcactaacactcctccctcyccttctcttcagcatccagcgtcggctgtccctccagctccccatcctccaccacgcctacctcccatccatcggaggcgtggacgccagctgtgtcagcccctgcgtcagccccaccgccagcccccgccacagacatgtgccaccctccttccgagtcatggtctcgggcctgtaagggtgggrggcctgggcccggggcctcccccgtgacagaaccacactgggcagaggggtctgctgcagaaacactgtcggctctggctgcggagaagctgggcaccatggctggcctctcaggaccactcggatggcactcaggtggacaggacggggcagggggagacttggcacctgacctcgagccttatttgtgaagtccttatttcttcacaaagaagaggaacggaaatgggacgtcttccttaacatctgcaaacaaggaggcgctgggatatcaaacttgcaaaaaaaaaaaaaaamaaaamaaaaaaaaaaactagacaaggagagaggcactagaactccagctggaagtcacggagtggctcgagcagccttgggaagaggcaaggagcttctgaagaaactgcctctgcacacacatcactggctgtgacccctcaggctagcccttctccactctgggggaggaggtgggaagggccaccaggcccccagctgccaggccagctgaccccagccttcctggaacagggagtctgcaggagcgcagacaggcacagccctggagcaggcaggccgagggctgcggcactggagcaggctgacttacatgctccacatgggacctgtgtcacccaatgagatgtttgttactctggtaaatgccacacgttaacacaataacacccattcctgggaccgtggggatttagggcacgtcactgcagacacgctctgcagcattcaccgacagtctgtcatgcacccaccacgttggccatgtccttgtgttcctatcggatgctcccagtaaccagggggaccacccgagctaatcatggaatgtctgttcccagcaaacacgataaagaaagattgtgcactttaacctctctcatcagggcccaagggctggctgggattttttttttttttttcccactaactttgtttctgaccaaagtgaattggaggcaytctgctaaaagacatccccgtagacataggggagagagttgctggctgagggcttcccttggcttccagaaggcagccttccatccagacaagccagtgagctctccccttgggatcactggggtgatcagtcagcagattgattctcattcataagatcattcctccctttaaattgagcccctaagagcactggcctgggagtcagacagacctgggttcaagtcctcagtcccctgcccactccctacgtgactttgatcaggtcactagtgtctctctgagcctcagtttcccctctgtaacttggggttgaactaaaacacctgtcctkcctacctcacaaggtcactctgaggattgaaacttgatcttgtccaggaaagctttgtaccaaacagtgaagccgccctgatccgtgaggtatgagtatgactctgaccttcagccctccctacagccgggggtgtggcccagagaagcttccagcacagccctctacccagaacatccgggctggagggaggctcccagtgacttttctgacattcctagacaggttcattctttgctcaagaaaggcctgaatgacaatgtccaggatgtctgcacaactgagcagctcgctcactccctaaagaaacctattggcagcttcaacaggcaggcaataatctcttcccagaaccactgcagtcaggaataaactgttttctccaccaggctttgacaaaagggcccacaggaatcttaccaatgccaacatttcaaagcaccctatttcacgtagcatagctttctgctccccttccccaaagagaggttatggaggtactgtagcttttagggaaaaaaaaatgttaacacatcacaggtcaagttgaagtcattctctgtttaggcactaaaaatcggtgttgtcactcactgtgtattaccagtatttacttgctttcttgatttcaccaaaaccaaatttaatttaaaggaccacattaatttttcaaagggaaagagacaattaattgtacataatgtatacacacacamaaaaaaaaatacctgtagaaatattattccagcatagcaggaaaacaaacaaaagtattggactgtcggaggtgagcctgtgcgtctgtaaccctttgtgactcctgagcgtgcgctgtcttctaggttaactcacgaagtacattctctgtcttactgatactgtaggttcaccsatttttttttaatttcctcgcaaataacaagacccacagaagtgactctagctacttaatggttctgttcttttatatgcagcaaacacaccgtccatttctgaagaggcttcggcctgaaggcattttccaatgatgttagtgcacaaaacgctttaaattagactggaactgccagaatcaaatgtaaatgaggaatttctcgtacccctactgcatggtatcgatttttaataaattgttgcaaatttgtttttatgaataaaaggaaaaaacctgtcgtctttaatgcctactcatcccaaaatgcaggtcagatcgggccatattcctccgcttagaaactcaggggacaattctggggttgcctgctcagcattgtcccttccttcataaactgcccatcccagcctcctgctgacagcggcaaagcagccctgttaccaggtgaccccaacttctggccacagctgattaattcgagggtgggaatttgacctaggctgggccggtaaatcacttcctcaggattcctccatgtagagaaatttagtctgcgatgaaacagaaaaaaaaaaaaatggagccaacagagagacaatcaggaccaacagctgagttctgatggtgtctgagtacctggttagcggtcccttcctgcgctcctctgaaagcacagccctgattttggggtaaggaaggggacctattggaagggaatcttgctcccaccatccttgctcccacccccggacacagtgattggttcaggaatatgctcattatccaggaccagccaatcagagcacttcccagggtttctgccagctgttttcaggaggtttgaaggcactctgggccctcctcacctgctcagttgttcaggacttccttggattctctgttcttctgatacattgccctttttgccgaggttagttcaagttgggttcccatcacttgcaatcccaagattcttaaataatatggaaaacccacaacctctccagccccaactccccttcggggccttgccagcctgtcgagatttggccccatgctcctttctagcctcatcatcccaccccccggagcctatggagccaccccaaagtctgttttacttctccagggtgctgagcctcagccggcagctccgactagatccccttcaatgggatcttctcttcctagctctggactgaggacattccccctctctacagcactgcatacatgcccacgctgtcccctccccattccggaccctgagctccctgacgatgggactcatgtctgcttccatgacgttccactgggcagcagttcctccctgtagctcagaatgggcttcaacgaggcttttcataattgaacattttgacagaggcttgtccacaytggttgctgggtctagaaggcagagtaaaagcagaggtggccacagcaggctggggaggcccgaggttcatgtgactgggtgcagtcctagaaatgggtgcactggactcacagactccactggagggctagtcccagcctggagttttccgggacatgggatcctcaacgtggaggctcccaaggagcaggctstctgaatcctggcccaggagacccctgctctgtgcctgctgctccacaccactgctcatacagccatcctacgggatgtgggttgttcaaggatgggaaacaggcccaacatgaagaatacrtacccaaggccacctaataaggctgtggcaaaggcaggaacaaccagaatcttagctggtcttccttctctacctgaccctgactcacagaaattagagcagagaaaggtggcagcggtcatctcacccagcccctcctagtacagttggggaaacggaggcccagcaactggagccaaggtcaaccagaaggtcacgagagggccagcatggaacccagatgtcctggttttgagacttggctcttctcagtccacttcccacacctgttctgccataggtagtacgaccacagcggtgagacgctgccccatagagcaatttctcagctaccacagactgagaaatctttacatagcctcactaaatatggagtcagccaagacaacatttggtctttcctcttagcacgtctgaragagagaaatgacccaagtgttgaagatgctccttgtcacatcactgaagtgatgccttgcttggccataagcaggaaaagcccagacagcaatggtgcacttcattcctcttcattcttcttcaaaagcattctgtcttccttttgttatgactgggtcatttctgagttaaaaataaaagagtgtttcccaacctcaaagacaggctttctggagttgaagccctcttagaaagctctgcctgggggtctcctcaccctggggtgtggagacaacactggggtccactctgagggaagaaggggagaggtttctgaaaacattaagcctggggcaccagccgaggcctgcccttccaggcagtttcctgtgctcagcaatttcttctctacaaggatcaggatccacaggcctagaagccagtgccagggagaggaggtggtactgggtagattgcaaaaagcagactggcggmcatcagcacctctgcctgtccagcaaccacatctgccttcctgcagctcctctgaaagcactgccctacttttgggggaaagcagaagagagaaaatctggagggccgcccttgcttccactgctggacacaggattggctcagggatatgctcattaaccaagcccagccagtcaaagctttcccctgccgtttttaagaagtttgaaatcttgccctccacgtggagagcaatgaaaagagggaaactgagctctcattgcatcatttaggctcaaggaccastgatacctaaaaatacatccatccttgagcttgtaggttttaaactaatacatacccttttctgcttacatagagttgggtttctgtcacttagaaccaaaagaaatctgtgggatgcagaggggctccacgaggggttcactgttgtctgaaaccctcctggtattaaggagacatgcaggagatatttccctggcctcacacacgctgctgaacagggaggtgggtaaggatacccaaagggaagatggggctaagaagcctcaggaggctaaagaagggtcaaggagccaggctgagggccggagggctggcaccaagctgcgtgcccagcacttgtcacctgcctgtcccctacccccttagcttgtcaccccttacttagccttgaggagcagggtttgtaggtactggacagtaaatgattaacacactctctggaagagaaaattggtccctcctctgcctccaccccacatctgaaacccctggcaaatcccaggggctaactccatcatacttggtctgccctgtccgtggtcctgagtgggtcctgcccagagatgacaattcactgtctggttcctccaggtcccaccttcaggagccccagaccctcaatggggcatccaccgagcccctgatctttgccaaggcctgtgctaggtgccaggtgaacagtgagtaggatataggtctcaagaagctcacacactaataggaagacagatgcttaatgaagaaatgacaatagcctgtgataagcacctgctccagaatggacatgcctcctgggggccatagcctccaaacagggctagttttgggggtttgcaacctatacagtttttaaagggcctcatgttcgacttaatgctctgctgtaactattttgaaattctaaataacttttgaaaagggggcttagaattttattttatttttattttttattgacttgtttatttttgagacaatgtctcactctgttgtccaggctggagtacagtggcatgatcacagctcactgcagccttgacctcctgggctcgagcaatyctcccmactcagcctacgagtagctggtactacaggcatgcaacaccatgcctggctaattttttattgtttagagagatgagatctctctaaaaaataaaatatttaaaaaaatttatgttgcccaggctggtcccgatcacctgggctcaagcagtcctcccacctcagcatcccaaagtgctggcattacaggcacgaaccactgtacscggcccagggcttagcactttaatttcatactggagcccacaarttatgtagccagtcctatacctagacctgaaaatgagtaaaagctagccagcaaaagagagaaagaagaggaggggagagggagagaactagcagcccaattctgtagaatgcatgcacctgcaggggctgctgtggctgcaccaaggacaactaagttgttgtgtgttaatcacctrtcatggaatccatgtgacttcagactgctgcgtgatcagacagcacgcatcctgtctrtgtgtgatgatgtgagttacatctgaaaaatcatcaggcctgggtgcacatttgtacaccttcacttacctggctgcatggctttgaatgattccacctctctgagcttctgatccctcatctgtaaaatggacatgatacctcgctcagagcttctctgacagtcaaagaggctcatgtaggggaaagtgccttgtgaacactaagcttatatttgtgctactcccagacaggaggaatgtaaaatgagcagctttagtaggtacaatggggcagccaacagcctagtctcctcacaacagactgcatctaggaagaatgtcattagggaaaacatcctgacatgctgtgttaggggcaaggtgagattctaaagacaaggctaaaagagagacagcagaacaattctgttagaaaaagaactagaartttggggttagaaggagagaaaaatgaaaggagtgggtgataaataacaggacagtgtggctaaaaagcttttaagaatagggatgtcagccaggtgcggtggctcatgcctgtaaccccagcactttgggaggctgaggcgggtgaatcacctgaggtcaggagttcgcaactagcctggcgaacatgatgaaaccccgtatctactaaaaatacaaaaaattagccaggcatggtggcacacgcctgtaaccccagctactcaggaggctgaggtatgagaatcacttgaacctgggaggtggaggttgcmgtgagtcgagattgcaccattgcactccagcctgggcaacaagagcaaaattccttttcaaaaaaaaaagaatagggatgttgaatatttgattttaagtcatttgtgttgcatgaagtaaaagcctctgtcttccctttatttcactccctcctgcaaaatgtccctaaacctttggttacatttactatacaagtaaaagctttgtgagttttagtggaaataaagaaaaacagcaaattctatgtttaggtagagaccagagtaaggataaaagaagcagcagccacaagatgcagagggaaaaatatgttctctggccaagcgcggtggctcacacctgtaatcccagcactttgggaggccaaggcgggtggatcacttgaggtcagaagtatgagaccagcctggccaacatggtgaaaccccatctctacaaaaatgcaaaaattagctgggcatggtggcacgcacctgtagtcccagcaactctggaggctgatgcaggaggatcacttgaacccgggagacggaggttgcagtgagccaggattgcaccactgcactccagcctgggcaacagagtatacatatatatacatatatacgacatatatgacgtatatatgtgtatactatgttatatataatgtatatatgttagatatatgttatataatgtatatatgttatatattatatatgataaatatgatatgtttcatatattttatatatatatatactctttgcatcagtgggaatttggagcaagaggtgaccatgagcccataagctctcccaaaattcacagaagcattgaagaagcactggtcttttccagagccaagtatggagggaatagaaagttaggattaatcacatctagatctcacagggcatagtcacccttactttccatctaagttacataagcaataggaaacatgtcatcccatagagccataaatctcaaacatcctgaatacaacagtagaaatactagaaaataagaccagcaataaaatggtcaactggatggcaaaacaatctccacactcaaagctttaggaatgacatgacataggagaagctgccagcctggaggctctggcagtgttgaagtgctattagctcggccatctttgttctccaaggttgtggctgttcttggctaccctagtccaccacgtctgtaactggagaagtctggtactattgtgaagttagggtttttgtgagagagaagatacatctgatttctctccatctgaattccaatggaaaagacccaaaacagtgtttctcaaacatgaaaaaaaaatagagagggccaggcatggtggctcacacctgcaatcccagcactctgggaggcccaggagggaggatttcttgaggccaggagttcaagaccagcatgggaacacagtgagactgtctctacaaaaaaacatttttaattatctgggcttggtggcatgcctgtagtcctagctacttgggaggcagaggtaggaagattgcttgagcccaggagttcaaggttgcagtaagttatgattgtgcccctgtactgcagcctgggccacaaagtgagaccaggtcaaaagaaagaaggaagtaaggaaaaaaagaaagagagaaggaagagagacaggaaggaaggaaagaggaaggaaggaagggaaggagagagagagaaagaaaggaaggaaagaaaaaaggaaagaaagaaggaaggaaggaaaagaaagagaagaaagaaaagagacatatggacacctttttagtgttgagttaaattgtttttataaagaaagttactgcagtgagctctgattgcaccactacactccagcttgagcaaaagagtgagaccctgttgaaagaaagcggaaagagagagagacatatggacaccttttcaaactgtgttgacttaaattatgaaatgtgctcaaaccagatataagcttaggcttacagcattcatataaaatccaaacaaaatagcaaagccaataaaaatcatgttaacaacatggatggaatgggatagatgaggttttgccgaaaaataagtggcagctcaccacacgagcacagctctgactgctgccgggcatgttcctgtgacttcagccagcctggtgtgatggctcaattatcacactgcttttctttatttaaacttctgtgaaaacttcatttattcagcatgctgcaatatcactgggctgtccctggactctaacatatcacttccctattaaggccacctttgtttgttttctctcatgagccattgacaatagtggggccatctgataatacacacaattggagtcgtgattgagtgcagatgcccattaagccccaggctaagtgctttgcaagcataatctcatttagctctcacagggaccccagcgcagaaccgatcattaccacccttctgcagctaaaggcactcaggcacagcgggtgagtgctgtcctgggtcacacagctgggatgtggagtgagtcacaatttgaacacagcagcccgatccagagtagaccacctttaccacttctttaaaccctagtcacaattagccggattcagatgacccaggatatgctttttttaaagattatcttgaaataaaaatccctcttgttttcagtttatagaagatttgcagacccccaagattcaccaagggcatcatctgaggctctaggccccagtctgagagcctctggcccaggcaatgtgaccatgagcaagccagtggctcagagcaacgctgggagatacactccaggcccctgggctcctcaggttgactcataaaccagcccctgggagattctgggcctcagggacacctggttttgagggcaagggagcctgggggagcaggggcagctccatgttgagcaacagtgacagtggcaatgatgatggcagtaccagagctcctgggcggctatgacaacagacacctgccatggctgtggtggccacagctctgaaggcaccagcccctcgatgggagtggaggtggaggtggggagttggtcaaaactaactgaagaggtagggcgacctccacatcaggaaggatgccgattcactcagggctagaggctggcagctctgccacagcagagaagaacctatgcagacacaaaatcctatgcccaagttgcccattgactagatgcccccatcccagatcttcaccctgggccactcaaccaggcctccaggatctagcagaaggactctgccagcatctcagggcaggggaggcaagatggaaggtgttcaccccatctgcaaagaaaagccagttctgagttttttctgtgaaataagagattacagacaaacgacgagaaaatggactgagaagaaaaaagggaagaaagtggggagggaagaaaggaggagggagggagggaaagttttgagattggagtagtgtcagaaacctgcacattcaactcctctctctttaattcttgctacaatggcccaaccaatcagagcaaatccatatcctcttccataaagattattctatctagatggtctctgaaaattagagaaagtgtcccacgcacatctctaaaagctcaagtcatttccaccgctcaggtaaagggtggagggaggagaagcagctgcaggccaccatcttctcactaagcgtggagaagaccacctggggttaattcaaactcagtagtgcaaaagccaagtagtcttggatttgattttagagcttccattctgagttcaaaggaccttcagatgtgggccggtatctccatgcaggagctgctggaagtcataatttcacaggacttctgcagaaccagcgctccagcatccactttctctcacaagtcacccccaccacagggaagaagaggaggcaagtgagagcagaattcatgagcagcagccatctcttctcatcccatgggggagccgggaaggcttaaataagttcccctccctccataagatcgggggtagcttaagtattcctccagaccctttccccttcaccaagtaagggactggcaatgcctttcatctgaaaacttcagcgccattgaactgcccaatgcccaggccagtgttgctggcaggtcgagagagggctgagcggaagagaggaagactagggtagccagtggcattcccacagggtggcttggcaaggagatgtgggttttccatgggttgtgtgggcactgaggaaggttgggagaatttcatcatcctaagaggctgaggaaaaaagtagatggatgaagttcagtcagaacttgctcaccagaggattgtgtcagaaggacccactggaaagccagcactcagacacctgcctggcagaggaacagacagccagataggaacaaaagaagtgatgccagcagaaagaagactgtaacctcacgcaaggagtcacagaaagcagtgttctgatacctctcccctctcttgcctcctttccctgatatctcagagaaaatagagaatgggagagcaaacctcatcacctccctccctgccccaagtcacagaaacctcaagtgcctgcctgggaagagtgcactttttttttttttttaaacatccagagactctttactttttgtggctttattgagatagaatccacataccacacaattcacccttgtaaagggtgcaattcagccaggcatggtggctcacacctataatcccaatgctttgggaggccaagacaggaggatcccttgagcccaggagtttgagaccagcctggacagcataaggggactccatctctacacaaaatttaaaaattagcccggcgtgggggatgcacgcctgtagtcccagctactcaggaagctgaggcaggaggatcacttgagcccaggagtttgaggttatagtgagcatgattttgccactacaacagactgagatcctaaaaaaataaaataaaatgaattaaagtatacaattcaaattttttagtatattcacagattcatacaatcatctccacaatctaactttggaacattttcatcactccaagaagagttagctgacagtccctatttctccccaagttcccccagcctaagcaaccacgaaatctactttctgtctctgtaagtttggacatttcacataaatggaacttgcaatatgtggttctttgtgatgggcttcttttacttaagataatgggttcaaaattcatgtgttatcaatatgaatgcaagataatgcattcatattgcagcatggatcaggactgcctcaacttttattgccgaatatagtctatagtatgtgtatacattttactttatgcaattattatccatgttatcagttagcaaacatttgagttgtttctacttttggactattatgaataatgatattatgaacactcaagtttttgtgtggacataatgtctttgtttttcttggggatataactaggagtggaattgctgggttgtatggtaactctagttttaactgtttgaggaactgccagatttttccactgcagctacaacattttacattctcatcagcatgtatgagggttccaatttctccttatgcttaccaacatttgttattatctatttttaaaaaaaaattcatagccatcctggtagatgtgaagtatctcattgtggttttcgtttgcatttccctgatggctaaagatattgagcatcttttcatgtacttattggccattgacatatcttctttgcaaaaatgtctgttcagagcctttgccttttatttatttatttctggaacggggcctcactttgtcgcccaggctggaatgcagtggtgtgataacaacggctcactgcaccctagaattcctggggcttaaaggaatcctcccacttcaaattcccgagtagctaggactgcaagcgcaagccaccactccctaatttttttagttttgtagagacagagcctccctatgttgcccagctagtctccaattcctgggttccaagcaatcctcccacctcagcctcccaacgtgctgggattataggcatgagccactgcacccggcgccatttttaagttgaataatttgaattcttcctattgagatgtaagagtttgttatgtattctagatacaagtttcttatttgatccacgatttgcaaatattttcttccattcaatgggttatcttttcatgttattgagggtgttctttaaagcataaaagtttttaattttgatgaagtcttacttttttcttttattgcttatgcttttgctgtcatatctaagctcaaatcacaaatacttctgtttttcttctgaaagttttttagttttagctcttacatttacaatccatttgagttaatt

SEQ ID NO: 96776 - DNA, 335966 bp, Homo sapiens
  misc_feature (1)...(335966): n = A,T,C or G
gctggagaatatgcttcccatatctcactgacacagctggcaaggtggtgctggctgttggcaaaatgtctcaattttttatcccatagatctctccatagggttgcctacatgttcttacaacacagtggctggcgtcctccagtgtgggtgatacagatgaaatccatgtgttttatgacctagtctcagaagtcacacaccatcacttctacattattctgttggtcacacaggccgccccgaggcagtgtgggaaggatctacacaggacgtgaataccagaagtgagaatcactggaagtcatgttggaggctggccactatccccttctcgctaaacctgacattatcactctcatatttcatgttccaccagcaccaaaagatttcagattcccagaacctatagggctgtgtcttccatctttgtgttcctcatgcctgcaagatcttttcctctcttttgtctggtgaattcttatcattcaaaattgtgtgcttatacttagtgcctagtacagaatgggagctcaacacacgttgagctgaaatccaaagaatagaattagaagggatagtccaggtaggctccatgctatcatcccacattaccttgaaatatgctgaaggccaggaaagtcagagtttgtggctcacctgggccatattgaaaaagggtatccatattttgtctaagaagccacagaataatatagttggagacaaacttcctccagatttataaaaatcaatgccaaaaaaattttttacaagcccaaggatttgataaaaaaaaaaaagtgttggaggaggaataaagagtgatgtcaggagaaggaagacatgttggttagcttattgacataataatgccacataacaaccaaccacaaatcctgaatagcatgcagcaagaaatatgtatctcttgcctgggagttttatgtcccctggagcggctctgctttgcctgcagtggctgagatgactttgcgtcactctgtgggttggctggtgtggctctgttccatctctgtcatcctcctatgataggctggctggtgatgagggagatgcaagagaacatatccaactgcaccgacatgtttccagccccttagtatattcctcagccaaaacaagttccatggccaaactcagagtcaaggagtggggaaatattgagaactacaaagttataaggcaatagtcaggggtttagggaggggtaaattgggactaaaaattcaaactatcaaagtgggaaaagccacaaaattttgggaaggaaaaagaatgtttctagctgttgaaagattgtctcctgaactaaacctaaaaatctactttgaaaatattcctgctggggccaggtgcagtggctcatgcgtgtaatcccagcactttgggaggccgaggcagacggatcacctgaggtcaggagttcaagaccagcctggacaacatggtgaaaccctggctatactaaaagtacaaaaaataatagccaggtgtggtggcacttgcctgtaatcccagctactcaggaggctgaggcaggtgaatcgcttgaagccgggaggcggaggttgtggtgagccgagatcgcaccactccgctttagcctgggcaacagaatgggactctgtctcaaaaataaacaaataaatgaaataaaaaagaaaatattcctattggtgtcaagttttcaattctgtataaatgttaataactgtggtactcctagtgaatatttgtgtattattttataatgtatatttgttgaaccaaatttctgaacttccttctaaagttaaggaaaaaacttgagcatcctaagatttctggcaatgatgaacactgtggtgttgcagactcatgaagtgagttgaggcactgaaagaaagcaaggctggtctggagagtccactgacttgccttccagagctgtcttcctcatggttctgtcagctcttagctggctctcagctaatttctggtcaagtgctagctgaaaatggctaaaagtgtttatctttcagggtgcatttggatggtaattatagaagcctagaaacctaagggagtcttcagggatgaatctccaatggtggaagatgaggtagcttgataatacatttaatgattttttttcctcaaagttgagaacattttatggcatttaaagcacttctacacattaggctgaatcacggtggcaatttcatgtgattcaacctattgtattatttattctttacagcaatcttcagacacaggcaggaaacagattcaggggaaatcacttagttgctttagatcacacagtaaatggtaagagtaggcctggaatccaagtcatctgctatcaagttcaatttttttccttacacaggtgtggcagaagtactttaaaacatttgttttgctctgtgtccacccgtgcctctctccttcccccagccccacactttctccttctctttgcctgtttctgtttatcaccttagtggcctggccccattcccttctgatacactagctagtgaacccatcatcttgaaagaggaatgtggtatatttccccctgttgagctactgcttaatttgtcagcctcctttactctgagcccactgtgatggctggactcttaaaatatacctagggctttgctccaacttcagccccaaagacattaaataattaacttccagcactctcctttgtgtgctttatctctgcatcacccaaaatagctggtggcatttcctctgtataaatagaaagcagaaaggtcaactggcatttttgaaatatatatgtatatatatatttttttttacaaagcagcaagctagcaggatccctttatttgctcatacctgtgactgtttcataacaagaaacttcctagtttaactccttagtcaatttcccccaccatcttgcagttggatcgttactaatacaatttgaagtggttcaaaattaagactgagtacagctgaaagagaaagcattttctcagtggtgataagtaaaagatttaacattcaagtaatgttaaatcttcttccccactcccaccccagtgaaccaaatgaaagtaaacttgagtgagcttctctttagaggcatggagctatgattcaaaatgatatttcttcctagctcttttttcttttgagcctgatgaagtgcataacacaaatccctggagagtaagctgtttttagtctgcacctgtcttctaagaaccatgttctgaaatgcaagataggaaggtgaatctgtttgtgaaagaaactatttgaaaatctagctatttcctcttaggacccagcacacaagttttgttctgttctaatgttataaaaaccatcgacaagaagattgggcaatttttattaactggggtaatattatggtccccgctcttccagtcatatttgcaatctggttggtcacaaaagggcatgtgagctctggggagcattttctggggtgaggtctcttccctgttaatgtgatggcaatttgcatgcctgctgtcagcagcagtgtggtcacatgcccccatcatcctaggtttcccagggcaaacctgattttcagtgttctaccatggcaacaaccacgggtcgtagattttgacctgggaaacacactcaagttccaaattctgaaaagtctcagatcccacctccagaagcagtatttgaggtctgcttttcctgctgcagacacaggggctgtgagagcacagacatgctcctgacccccagcctcccagccaggaataattctccagtatgcagggagagagggtgagaatgggcatcattagctttgggaagaggcagaatgaagttttgtgcagcccccaaaacctctctataatgtaagggagttgtgggaactcagaagagtgatgttcataacccttgagcactagagaaattgtgggttcacctgggtggttcctttggttgctgggcagggatagaagtgaagccacaggatagagtgttagggcacagtggccatgcccctttgtccttaaaataagcccattaagttctctcaagttattcacactgactcacctaccactccaccccagtcactacttgcttatattcactgtgaagcatttgaagtctttggacccttcttggaagtcctcataccaccttccaagatgtgagattaattaagcccccaattaagagcagccaaaacactgttccaaaaagagggagggggagaagagagacaacagaaagaaaggtcttgaacaattgttctgtgtggtaccagtggcactggcaccacctggaaacatgttagaaaccgtgatctcttgaatcagaaatgctggtgatggaatccaccaatctatgcttcaacaagcactccaggtgattcgaatgcatgctcaaatgtgggaatcactggtctaaaagagtgcatcatgcaggaagcacagcaccactgaaaacaagttagtaagataaagaaactctcttagtttcctcagtcatcagcaggaggctgaaaagtgaataacagtactgtgggcatcaaattcacccagacagttctgaaacaatagatatgttttagccccttgtcttcccagagaagggagtggggtgggtcttggtattgacaaagattatctcctcgaccaaactttagacaggctcttttgagccctcttttttatgaggcctcattcttggctctgtcttcagcctgccaaacccagttttagcaagaattctggtaaagtcagtttattgagaataccccacatttgatagctgatcaccctcagtatctgatcaaattcctcatcacctgccctcaatctctgatgaccctggccttcctccagtgggaatcttaagtcagtttagcaggaatctccctgctatggtgtgaatatttgcctgctccaaaacttatgttgaaatttgatccccaaagtggtgatgttgggaggtggggcctagtggaaaatgtttggattatgggggagcaccctgaaaaatagcttgctactgctctggagttcttgctctctaggctggattgtttcttgaaggaatggattatttccccaaagggtgggtgttataatgccaggacacccctcaggtttctctgtcttcctacttgtccacttccccttcattgccgtgttgtgatggaacacaacagcttttgccagaagccagggccatgccgttgaacttctcagcctacaaaaccgtgagctacataaacttcttttctttataaattactcagcttctggtattcttttatggcaacactaaacagatgaatacaacccccaacctttgaatactccttttagaaattttccatccaccaaggcccgtatcctgctaattggctattaatctctagttttctttgcttcagcaaagaaacttcagagttgagcccaatgcctctcccatattgcaatattgttgatacctatcaaaatagtcctgattacagtctttttgccatttcaataagtgtcaataattttttcattaacagtatatttaaatgtgtctatgtttaaaaagcttcacaagcaaatctaatatagttccatggttgaaaattctgatagacactggttaagagtatggattctggaatgcgacagacctagtttcaaatgccaactctgcttcttgcagctgagtgactaagcaaattacctaacctgagcatctctctttctctgttgtctctctctctctctttctctctctttcactctatctctctcaagttagtgaaaagatccaatgaaggcccttaaactactaagcacagtactagtacccaacaggcaccaaattaaccaaatattactggctctaagtaataattatcaaaggatggatatgttacattcaataagaaagttttacataaggaaaagataaaataggtgatttattttgtaactgtgaaaactatgtttattttgaatacaaatcttgaattatctatggatgagtttgaaataaatcatagaagagaatcactttttggatttttaatccaggtccttgtgtgtgtatgaaatacacacatatcttccttattagtcatggaagggcaaaagtggaccaaaaacaggtcagctaagacaggcatgtctggcttctgggctgtagctcagcatgttgtaggctagagtccagtgaccttcactggcaggctgcctacagtccatgagaccctaggcagtcaggcactgagctctgtcctccagctgaaaataatgaagagcacacggcttctccccggtcatcgtcagggtgactcaatcctgctggaagccctgagggcgcacatgagagaaatgcttttcaagggagccaaacttgatctataagcttatctcagggtatagtccaaataacacttatgactccaagcataggcagccatgcttactactctctaaagaagccagtacttctgatgaggaattgaaagtcaagatgggagctctgcttttgtatccattccccataatagagttcagcttatatgttaaatgaattttcacataaatttgtccacttgaacttctgcttctttttgatagttgcctagagatggttctggagagtaggttcttttcccatcgtgatcagcaactgctcttcaaagtacaggagctggtccacttcaaaacagtcgctggcttgaggcaccactttytccaaacactcrcggatctctgcttcgctagcattctgatgccttgctctcttgaggtaattatagacctcttcaaatacttctgtccccagcttctgcatggctgatctgtcaaaaaagttacaaaagattacaaagagttacacattaagatcacctgcaggaaaatgtgcttttaaatcattgattttacaaacattgtcattctgggatttagaaaaaaagggggaagaaaaggcacaatatctccaccctaaacatttaacagtattcaacaaataatgcctcaatgtctattatgtgccaggtacccttcaaggaactgggaatatagcagtaaacaagttaggcaaagtcctgcccttgtgtgtgtatatatatataatacacagatatacacacagatgtgtttatataaacgtatgtatatatacacatatacacataagatatcagatggttctaagtgcaatgaagaaaaagcagggtgaggcggacaggaaaatccttctgaggaagtgtcatttgagcaaaagctctcaggaagtaagacaaatactargggcaaaagaattttggccctaaggctaaaacatattggaaaaataacaagaaagctattgtggctggagttagtagaacaaagggaaacaggatggtgggatataaaatgcagaaatagttaataataacaaaataataatgaggaggaggaggaggaaaatgagggggagaatagttttgtttgccacttgccaggtccttttctactcactttgccctttcaatcacacttaacctttacaacagctgtacgaaggaggcaattttttaaatccctattttacagatgaagaaactgaggcttaaaaggggtaaagttatttggccaagtttccaccaaggccgacattcattttttccacacttccagtgattgtccatatgtcaacataatctttatgttataatcatattgccatatctagtatgtttatttcaccgttgactattttcctctatctccagaaagggtcacaaactaaagacctatgggcaacatttggtccataacatgttttgtttttcaataccatgttttatcttcctttattatttttaaatgttttaatgtgaatgtctttatgtggggcctgcaagcactctgtactctgcattttctgaccgtctttgacctacctcccctatcttttatcatcttataccaggctccttctcatagttcttctacccacttaactcaagggcattcaagttggtggattttgttttgcggttcttcacggttgtcgtttttaatggctccatattgttccactgaatttatgtgccaatatttactccattttcccttcaccaaacaatgagcttttttttgctcctttgcactataacatagtgtgaatacctcatctttagatattaggcttttacattttaggggaatattttatgacatcaaatttttaggagttgggctattatgtgtgtgttcactctaaaaatttatatgtgtacttatggtttctgcacttttctctgaagaacagagaaaagagtaaatatatgttgtgcttgattaaatgataaaaatgttatgggaatgagattattaggtcaaagtgtataaatatttgtgtgactttaacttgaagaaatattactttttcttcatttcaatggatttggtaaaaagaaaaaccaggatgtgtattttttttttttggagatgaagtctctgcactggtgtgatctcagctcactgcatcctctgcctcccaggttcaagcgattctcctgcctcagcctcccgagtagctgggattacaggtgcctgccaccacgcctggctaatttttgtaatattggtagagatgggatttcaccatgttggccaggctggtctcgaattcctgacctcaggtgatcccaaagtgctggcattacaggcccaccttggcctcccaaagtgctgggattacaggtgtgagccaccgtgtccggccttttttcacaatttttgaagcattaatgcttaacagtaatgatggtaatgttgataataacattggagacattagtcacagactcattcattttataagcttttattgttcagtgttattcaagcttgtaatctctaaatcataggatatgtgttacgtattgtggccgataaagagatgaataggtaattcttctagctctggtttaaaggctggtcatgacaatgcaagacataaatttttaattttaactaacatttctatagccctttagagcttgcaaagtgcttttgcattcattatttcaaatgctccttatgaactaggcaattcattgaacatttgtcttcattttacagatgagaataagcaggtttttcgtagcctttcacaagctcacacagttagtgtggtagagtttggactcaaatgctgatcttaaaacaccagatgctggagaaaccagcagccctaggctccacaataagtttcccaccttctgtcatgagattgtcaggactgattccagcatgcctaacatccctagtcacctcagtcacccccacaaaatccaggtgtttcttttgctgacatctaccaaaccctggtcattctcttcatacactgattacttcagtgactagcccactctttcttccaccttgtactcttgtcatcattcttaacttctgtattcttgctgtctctggttttgaactgcctcgcattcagccatcatttcttttaccctacctgagttgcccattcccatgatcatatcaattgacctcatcagtgccaatgactacatgacctctgaaattgatttcaagcctcctactctctaatcaccccctcaatgccctcccaccatacttaccagctaatcttccacttcatggtgcccttcacttcgactctacccccatgataataattactcacttcttttgtaacctcatatactcactcctcacctacctcctcacagttaatttcatggcccatcatcataaccattatctcgcaaatacctttgactttttccacccctttccctttgtttggcaaagacctaatggttaaactcagtcgtatacctactccatggctgtacccaaacaagagaatatttatggagaaaagcatccaaatataccaagtctctcatttaagatgataatcttgattcagaatggcactcagcactgcccagcaatcttaccgtgtttccccagtatgtttattttcctcccaaaatgactacttcaaatgttttcctttattcttttaaaaaatattttatttttgatttttaaattttattgtgtatatttgaggtttacaacatgatgttttgggatacatatagataataaaatggttactatagtgaagcagattaatatatctatgacctcacatagttacttttttatgacaagaacagctaaaatctacttatttaacaaaaattcccaatacaatataattttattaattttagtcctcatattgacattagatctctagacttgtccatcctacgtatctactgttttgtatcctttgacctacattccctcatttcctctcccctaccaaccctgcctgaggtaaccgttgtttcattctctatctctgtgtacttgagctctttttttttttaaatattccatatataattgaggtcatgcaatatttttattcctatgtctggctatttttcacttagcgtaatgtcctccaggtctatccatgttatggcaaatgacaggatatccttttataaggctgaataatattccattgtatatatatgccacactttctttatccacttctccattgatagacatttagattgtttccatatcttggctattgtgaacaatgttggaatgaacatgggagatatctttatggggtggtattttcttctcctttgggtatatacccagaagagggattgctgggtcattggtagttatacttttaatttctttaggaacctctatattgttttccatagtggctgtaccagtctactgtcccccagcagtatatattagggttctcttttctccacaccaacatttgttatttcttctttttgataacagacattcttaggggtgtgaggtgatatttcataggttttaatttgcattttcctaatgattagtgaccctgagcaccttttcatatccgttggccatttttatgtcatctttggagagatatctgttcagatcctctgsccattttaaaaattgagttatttggttttttgcagttaagttgtaagagtttttataaattttggatattaaccacttattagatatgtggtttgcaaatattttttcccagtctgtaggttgtcttttcctttgttaattgtttcctttgctgtgtagaatctttttagttttacatactcccattaatttatttttgcaaaagatcagaataaaaataaatagggaataaaaaacatagaaaaaaattaatcaaaccaagagttggtcatttgaaaaacaaaacacaattgacaaagccctagctagactatgaaaaaaagaaaagatgcaaataataaatcaaatcagaaataaaagtggagacatcacaacagatgcatcagaaataaaaaaggattataagggactgatatagtttggatatctgtccctgtgcaaatctcatgttgaattgtaatctccactgttggcggtggggcctggtggtaggtgtttgggtcttgggagctgttccctcatggcttggtgctgtccttgtgatagggaatgaattctcacaagatctggttattctaaagtgtggcacctctcccctccccactctctctcttgcttttgctatgttacatgcctgctcccacttccccttctgccataagtaaaagctcgctaaggccttcccagaagccaagcagatgttggtgctatgcttgtacaggctggaaaaccataagccaattaaacttctttctttataaattacccagtctcagatatttctttatagcaatgcaacaaatagcctaatacagaaaattgataccaaggagaggggcattgctataaagattcctgaaagtgtggaagcacctttggaacctgggtaatgggcagaaattggaagaattcacatggctcagaagaagagaggaagatgaggaaaagtttagaacttcttagagactggttaaatggttgtgaccaaaatgctgatagtgatatgaacagtgaagtccaggctgacaaggtgtcagatggaaatgaggaacttattgggaactggagcaaaggtcacaggtgttatgccttaccaaagagcttagctgcattctgtctatgccctagggatctgtggaagtttgaacttcaaagtgatgattgagggtatctggtggaagaaatttctaagcagcaaagccttcaagatgtgtcctggctgcttctaacaacctatgtccagatattggagcaaagaaatgacaaaatttggaatttatatttaaaagggaaggatagcataaaagtttggaaaatttgcagcctagccatgtgacaaagaaagaaaaagcttttttgggggagagaaattcaagcaggctatggagcaaccacctgctagagatatttgcatacctaaaagtgggttaagtgtaaatatccagacaatgaggaagaggcctcaaaggcatttcagtgatattcatggcagcccctcccatgacaggcccagaggcctaggagggaagaatgggttcaggagccaggctcagggacccactgccctgcacagcctcgggacactgctcctcacatcccagctgctctggtttcagccttggttcaaagaggtccagcttaggccagagctccagagggtgcaagccataagctctggcagcttctacatggtgttaagcctgcaggtgcacagaatgcaagagtgaaagtggcttggaagcatcttcctaggtttcagagaatgtacgcaaaagcctggtgttcagacagaagcctgctgctggggtgaagccctcacagagatactctactagggcagtgtggaaggagaatgtaaggttggaccctcaccctagttctcagccaatgacttcacctgttttctcaaatggaaaaccaaaacaatcacataaacattccattttcccagtattcaaactgcccacttatttggatcagtaactatatacttggcctcctcttctgtgcctaattaagggatcctccctgctcctatcaaagacaaaactctacctgagtgctctggatcctggcctctgtcaccatcacagtgacattccctcctgcagtcatcttctctctttacctcacaatcactttctacctctactagatcattcctgttagggtacacacatgacctgctatatcttttcctaaacaataaaacctcctttaacctccacatcccccaaggctcatccccttctcaacccatcactttgatctctattcccaacaaaacttcttgaaagagttatgtttgttgcttttttactgcacactctttctgaatccactcctcttgagtcttggccctctctttttccctgaaactactctcactatggtatcaatgactttcatatggccaattcccctggtcacttctttgtatacatatattttttcttttttaaaaattgaggtaaaagtcatttatcataaaattcctattgtgtataaattggccagcctgaagtattttgttatagtatcggaatggagtaaaatacttaaattttctatgtcttcggtttcttatatttaagtggggatttcatacacagacatacatgcatacatatacacacacacacacctcttatcatgctaggtattatttactatcatgtacgttattgttgctttctcagtggtgaattgcatagcaatcctatttctgttaaactggaagcctcaaacaattttgtagctctatcttggttaagatactattttagattttttaacttctctggatgaatttgaaaaaaaaaaaaaagacaccaggagactagtgacacagtgggagtgaaaaacatgtaatttcttagaaataatcatgaaaacctggtttaccagaaagccttaagagaacacaggcatagtttaaggaaaccctgaaaatgattttgtggaatgtaagaaatccctgcacatcaaatatgtgtgagtcactgcaggaatggaatggtacaatgtattttacctttaatatcgtcatttcaacaatcatttggtgctaacaagcatccggaatcttcattaaggatacattttacagaaagaggtttaaaattctccatgtgtagtgtttcaaatggctgtctctgaatcaggtgggcaaagacagaacagctctctctccagaagcaggcaggtgaactggtagaggcttccatagcctgcagcgtgcccagatagagcacgtgccttgaaggcctctttctgtcaatggcacttccctctttctcagttcactctgggcaggatcctgagtgcaaatgttggtttaatatactgttaaaaaccatttctaaaaggattattttaattgtgacttaaatacccaccatcattcataattataataaatgtaaatggactagactcactgactaaaaaacaaaatccagctaggtgttgttacaagaaatatacccataacatgatggcattgaaagattgaaagtaaaataatttttgacaaagctaccaggcaaataataaccaaaagaaatctagggtagccatattaatatgataaaaatacattttaagttaaaaaagcattattagagataaagaaagtcactacataataattcaattcacaaagaagaaaaaaagaattctaaatgagcatgcatctaataaaacagaatcaaaatacatagaggactacaaagagaaactgtcagatatattctcacaatgctggattttaatataccttgctcagttattgataagtgaagcattcaaaatattagtaatgatagaaaatatctgaataacatacttaataagctgarcttaatagatacacatagagcaagacattcttcccaggctctcatgtaacatttgcgaaaactgaccatgtgctagacaatttaaccctcaataaatgctgaataattggtttcatataaaatctagtgtctgaccacaataaaattgttagaaatctgtaataaaaataaagattaaacatttacacatgtgagtaaattttaaaataatacattctaaataaattacgggtcaaaaacaaaatcagtcattccataaacaaactcattttaggctgacagaaaagctataggtgttctagtcttggaatattgccgtgtaaatttattctgatatttggaaaacacactatattctgcaatgatgcatttgaatttttagattcataaatagaaattcaatttaagaggactctcttgctgttatctaagatgtgagaagggagggcagtattctctgtgctgttcaaattaaaagagttcctatgtttcctttttcaaagagagggacatggggtggcaggaactattcctttagttagctgggtatctcaaataaaaagaatttatattttcattgttttctatttctttctatggtgcatttcctttctaaattttatcattttcttcaagaaacaaaagccttttaagttttttagggattgtcaaacatcattttagtccaaatacttcatttacaggttgttttgcccaagattgaattggcagttggggacaaataggggactagagtccaggtttcaggactctcaggacagtgctcgttgggctggataatggtcccttgacacaggagtcctgaaggaaggttccctaatgttccaaaatttgaactgcttggggtcacatcccgaatacgtgtttggctgactcccttgctgatgaaaaactattaaacaccaagaaagctcttcttctctcccctgcccatttcctccaaactcaatctctcatcctccaaattcctttattacctcttcctgtgcttacctttcatttataaaaaaatacattttatcacatctacttatttgcccatcaattatagactatgctgtgtaccctctaattatttatctctatctaataagggctctaaagaatacagccatagctgcttagttttataaggataatatctaaaatgtcctcatattttaaatattattttaattttgaatcccatacttacagaaaagttacaggaatagtataaagaactattttgtccctgagtcttttgagaataagttgctaccccaatgtcccccactcatactttgtgtgtattttgtacraataaaaacacttctacataaccacaaaactgccaccagaatcaggaaattcacattaatagatctgattctgttatcttgtatatggaaacattcagatttcccccaattgtccaataacactgcctgataacaaagcattcaaaataatcatgagttccatttacttgtcatgtctctttagtttccttcaatgatctggatgctagaatgtccctcaatttgcattgctcacgcctttgggatttaccagctcttaccctctggtcatccatccttttatgtattagcctaaaggatgacttcaggagtagtgtctttcattatcttggggtattattagagagctccacctacaccagttcaagaaggttcttactgctcttgggtaaaaacaaagctttgatagtaacaggagagggatcttgccacttccaggtgcctactaatgattcttccatgcaatctgttcctgttcctgtttactgtaagaaacaaggactcctcttagggaagggaagcagcttgtgaagtgagtttccagaagctcagaatacaatgctttgtcccaaatatttccctgtacccccaccatcacactttataaatcccaccagtgaagggtacattcacacagctgaagaaatcacttctcaaagcagctgttagcttcttaggataaggttcaggggctgcaaagatgagcacagtgaaaagaccgaagccccgttagacactctaagtgctggctgggattctgccaccaactttctgggtggcactgggtgagtgactttcacttttcagagcctcagttacttcatctgcaatgtagactaactgatttctaaggattccttcagctctaaatgttcaattataagtgagagctcaggaagacattctttgcttataggtgatcgataattatttgttgaaaaaatgaagtaaaaaatgacttaaaagccagaagaaaatagacactttgtgagtcatgaatttcactccttttaaaaataatatctgagtaagcaaattctttttaagggctttcaatcatgagtaattctttctcagggaaaggaggggaaaatagaagaaaacttgtttttcaaagagtctkttaagtcccaggaatgttttgtttttatttcatctttgggattccctcttttattttttatatattttttaaattgataaaaaaatatatataacaaaatttcttcttttgaatgtacagctctatgagtttggataaactcattcagccatctaactcacacctcaactgagatacagagcaatttcatcacactccagaattccctcatatccttttgtaaccaagtcctccctccaccccttggtgataactgacctgtttttgttccttcagttttgccttttccagaatgtcatatgaatggaatcattcagaatgyagcttttaaagaactggtgcctttcamttaacatagcatctttgagattcatctaaactgctgtgtgtattataatttgttccttttattgctgatcagtgtttcactgtacggatgtgctgcagttggtttatccattcatagctgaccaatatttgggttgttcctagtttttgaagattgtgaataaagttgctatatgtattcatatgtaggtttttgtgtggacatatattttcacttgacttggataaatacctaggagtggaatttctgggttgtatggtaagtgtatatttaactttataagaaactgcttattgctkctcagccgtttggtgaagatcaagtgtgaagaaaccactcaactgttttccaaagcagatgttccattttgcattcccaccagcagtgtatgacagtcttagttgctccatatccttgccagacttagtattaaaaaaaaaaaaaaaaaaaaaaaaaacagctgggcgccgtggctcatgcctgtaatcccaacactttgggaggccgaggccagtggatcacgagggcaggagatcaagaccatcctggccaatatggtgaaaccccgtctctactaaaaatacaaaaataagccgggcatggcggcgtgtgcctgtagtcccagctactcgggaggctgaggcaggagaattgcttgaacccaggaggtggaggctgcagtgagccaagatcgtgccactgcagtgacctgagatcacgccactgccctccagcctgggtgacagagcaagactccgtttcaaaaaaaaagaaaaaaaatttatgccaagcacttgatatctattttttaatgtgttatttacacaatcatatgaggtatgcgatataactcctgtttcacagttgaagaaactgaggcacagatgttaagtatcttaaccactaaatggcactacatggagggggggttcagattgattctcattcaggctttgctcctagctagctgtgcagtctagtcactcagttctgtaggccagtcactgtcttcctttataaatgaagacattaacttctggaacaatttctaagctgatttttatttttatttatttttatttatttattattttaaattttattattattatactttaagttttagggtacatgtgcacaatgtgcaggttagttacatatgtatacatgtgccatgctggtgtgctgcacccattaactcgtcatttagcattaggtatagctcctaatgctatccctccccactccccccaccccacaacagtccccagagtgtgatgttccccttcctgtgtccatgtgttctcattgttcaattcccasctatgagtgagaacatgcggtgtttggtgttttgtcgttgcgatagtttactgagaatgatgatttccaatttcatccatgtccctacaaaggacatgaactcatcattttttatggctgcatagtattccatggtgtatatgtgccacattttcttaatccagtctatcattgttggacatttgagtgggttccaagtctttgctattgtgaatagtgccacaataaacatacgtgtgcatgtgtctttatagcagcatgatttatagtcctttgggtatatacccagtaatgggatggctgggtcaaatggtatttctagttctagatgcctgaggaattgccacactgacttccacaatggttgaactagtttacagtcccaccaacagtgtaaaagtgttcctatttctccacatcctctccagcacctgttgtttcctgactttttaatgattgccattctaactggtgtgagatggtatctcattgtggttttgatttgcatttctctgatggccagtgatgatgagcatttttacatgtgtcttttggctgcataaatgtcttcttttgagaagtgtctgttcatgtccttcacccactttttgatgyggttgtttttttcttgtaaatttgtttgagttcattgtagattctggatattagccctttgtcaaatgagtaagttgcgaaaattttctcctaktttgtaggttgcctgttcactctgatagtagtttcttttgctgtgcagaagctctttagtttaatgagatcccatttgtcaattttggcttttgttgccattgcttttggtgttttagacatgaagtccttgcccaygcctatgtcctgaatggtaatacctaggttttcttctagggtttttatggtttcaggtctaatgtttaagtctttaaaccatcttgaattaatttttgtataaggtgtaaggaagggatccagtttcggctttctatatatggctagccagttttcccagcaccatttatgaaatagggaattctttctccattgcttgtttttctcaggtttgtcaaagatcagatagttgtagaaatgcggcgttatttctgagggctctgttctgttccattgatctatatctctgtttggtaccagtaccatgctgttttggttactgtaaccttgtagtatagtttgaagtcaggtagcgtgatgcctccagctttgttcttttggcttaggattgacttggtgatgcgggctcttttttggttccatatgaactttaaagtagttttttccaattctgtgaagaaagtcattggtagcttgatggggatggcattgaatctataaattgccttgggcagcatggccgttttcatgatattgattcttcctacccatgagcatggaatgttcttccatttctttgtatcctcttttatttcattgagcagtggtttgtagttctccttgaagaggtccttcacatcccttgtaagttggattcctaggtattttattctctttgaagcaattgtgaatgggagttcactcatgatttggctctctgtttgtctgttattgatgtataagaatgcttgtgatttttgcacattgattttctatcctgagactttgctgaagttgcttatcagcttaaggagattttgggctgagacagtggggttttctagatatacaatcatgtcatctgcaaacagggacaatttgacttcttcttttcctaattgaataccctttatttccttctgctgcctaattgccctggccagaacgtccaacactatgttgaataggagtggtgagagagggcatccctggcttgtgccagttttcaaagggaatgcttccagtttttgcccattcagtatgatattggctgtgagtttgtcatagatagctcttattattttgagatatgtcccatcaatacctaatttattgagagtttttagcatgaaggttgttgaattttgtcaaaggccttttctgcatctattgagataatcatgtggtttttgtctttggttccatttatatgctggattacatttattgatttgcatatattgaaccagccttgcatcccagggatgagcccacttgatcatggtggataagctttttgatgtgctgctggatttggtttgccagtattttattgaggatttttgcatcaatgttcatcaaggatattggtcttaaattctcttttttggttgtgtctctgccaggctttggtatcaggatgatgctggcctcataaaatgagttagggaggattccctctttttctattgattggaatagtttcagaaggaatggcaccagttcctccttgtacctctggtagaattcggctgtgaatccatctggtcccggactctttttggttggtaagttattgattattgccacaatttcagatcctgttattggtctattcagagattgaacttcttcctggtttagtcttgggaaggtgtatgggtcaaggaatttatccatttcttctagattttctagtttatttgcgtagaggtgtttgtagtattctctgatggtaatttgtatttctgtgggatcagtggtgatatcccctttatcattttgtattgtgtctatttgattcttctccctttttttctttattaatcttgctagcggtctatcaattttgttgatcctttcaaaaaaaccagctcctggattcattaattttttgaagggttttttgtgtctctatttccttcagttctgctctgattttasttatttcttgccttctgctagcttttgaatgtgtttgctcttgcttttctagttcttttaattgtgatgttagggtgtcaattttggatctttcctgctttctcttgtgggcatttagtgctataaatttccctctacacactgctttgaatgtgtcccagagattctggtatgttgtgtctttgttctcattggtttcaaagaacatctttatttctgccttcatttcattatgtacccagtagtcattcaggagcaggttgttcagtttccatgtagttgagcagttttgagtgagtttcttaatgctgagatctagtttgattgcactgtggtctgagagacagttgttataatttctgttcttttacatttgctgaggagagctttacttccaactatgtggtcaattttggaataggtgtggtgtggtgctgaaaaaaatgtatattctgttgatttgggatggagagttctgtagatgtctattaggtccacttggtgcagagctgagttcaattcctggatatccttgttaactttctgtctcattgatctgtctaatgttgacagtggggtgttaaagtctcccattattattgtgtgggagtctaagtctctctgtaggtcactcaggacttgctttatgaatctgggtgctcctgtattggatgcatatacatttaggatagttagcttttcttgttgaattgatccctttaccattatgtaatggccttcttggtctcttttgatctttgttggtttaaagtctgttttatcagagactaggattgcaacccctgccttcttttgttctccatttgcttgctagatcttcctccatccttttattttgagcctatgtgtgtctcagcacatragatgggtttcctgaatacagcacactgatgggtcttgactctttatccaatttgccagtctgtgtcttttaattggagcatttagtccatttacatttaaagttaatattgttatgtgtgaatttgatcctgtcattatgatgttagctggtgattttgctcgttagttgatgcagtttcttcctagcctcgatggtctttacattttggcatgattttgcagtggctggtaccggttgttcctttccatgtttagtgcttccttcaggagctcttttagggcaggcctggtggtgacaaaatctctcagcatttgcttgtctgtaaagtattttatttctcctccacttatgaagcttggtttggctggatatgaaattctgggttgaaaattcttttctttaagaatgttgaatattggcccccactctcttctggcttgtagagtttctgccgagagatccgctggtagtctgatgggcttccctttgtgggtaacccgacctttctctctggctgcccttaacattttttccttcatttcaactttggtgaatctgacaattatgtgtcttggagttgctcttcttgaggagtatctttgtggtgttctctgtatttcctgaatctgaaggttggcctgccttgctagattggggaagttctcttggataatatcctgcagagtgttttccaacttggttccattctccccgtcactttcaggtacaccaatcagacgtagatttggtcttttcacatagtcccatatttcttggaggctttgttcatttctttttattcttttttctctaaacttcccttctcgcttcgtttcattcatttmgtcttccatcactgataccctttcttccagtcgattgcatcrgctcctgaggcttctgcattcttcacgcagttctcgagccttggctttcagctccatcagctcctttaagcacttctctgtattggttattctagttatacattcgtctaaatttttttcaaagttttcaacttctttgcctttggtttgaatttcctcctgtagctcggagtattttgatcatctgaagccttcttctctcagctcgtcaaagtcattctccatccagctttgttccgttgctggtgaggaactgcgttcctttggaggaggagaggcgctctgttttttagagtttccagtttttctgctctgttttttccccatctttgtggttttatctacttttggtctttgatgatggtgatgtacagatgggtttttggtgtggatgtcctttctgtttgttagttttccttctaacagacaggaccctcagctgcaggtctgttggagtttgctagaggtccactccagaccctgtttgcctgggtaasagcagcggtggctgcagaacagcggattttcgtgaaccacgaatgctgctgtctgatcgttcctctggaagttttgtctcagaggagtacctggccatgtgaggtgtcagtgtgcccctactggggggtgcctcccagttaggttgctcaggggtcaggggtctgggacccacttgaggaggcagtctgcccgttctcagatctccagctgcatgctgggagaaccactgctctcttcaaagctgtcagaccgggacgtttaattctgcagaggttactgctgtctttttgtttgtctgtgccctgcccccagaggtggagcctacagaggcaggcaggcctccttgagctgtggtgggctccacccagctcaagcttcccggctgctttgtttacctaagcaagcctgggcaatggcaggcgcccctcccccagcctcgctgccgccttgcagtttgatctcagaccgctgtgctagcaatcagcgagactctgtggttgtaggaccctccgagccagttgtgggatataatctcctagtgcaccgttttttaagcccgtcggaaaagcgcagtattagggtgggagtgacccgattttccaggtgccgtctgtcacccctttctttgactaggaaagggaactccctgaccccttgcgcttcccgagtgaggcaatgccttgctcgccctgcttcggctcacgcacggtgcgctgcacccactgtcctgcgcccactgtctggcactccctagtgagatgaacctggtacctcagatggaaatgcagaaatcacccgtattctgcrtcgctcacgctgggaggtgtagaccagagctgttcctattcggccatcttggctgccctccttctgatttttaatatctattaattcttaacaaactggagacattgctaatgrtttaatggatacccggaaggtcattatcatctaatattcattactcaagcccccaaatttacaaggatttttaaagcatcagaacttaaaaatatctactgataaatggttgtgtataaaattagtccaccctgaaaactgcctctttgctgaatgctagtttctatctctgtccatcacactaagagttctgttaccggtgagctgtgacagggtaaacacaaagtgcaagtgcaaagtaaactgacttcattaaaatggcactgcaaaacttgcagatgcaggatgtcacatagtgcatgaatgtgtcccccaaggttcatgtgttggaaacttaattcccattgcagcagtgttaagaggtgggacctgtaagaagtaatttggtcttgagggctctgccttatgaatggattaatgctgttattatgggagtggttagttattgtaggagtgggttcctgataaaaggatgattttgccccccccccttccttctctcttttcccctctctcttgcccttccgacttctgccatgggatgatgtagcaagatggcccttaccagatgctggcaccttgatatttgacttcccagcctccagaactgtgagaaacaaatttattttctttataaattactcagattgtggtgttctgttacagcaacacaaaatggactatgtgaagaaaaccatgttggaatcttgtgctgtcattgataagaaaggatctgagcattaggtcaatyaccaaaaaactgaaaaatcagtaacaatgatgacagactcttcaaataggatgatttaaattttaggaaattggaagaagactccaagaaacttaacaaggtcctccaatattttccccaaaatgatcttctctgatttgactatgcttgttcctccatatctccctgatccctagacttcttctgtcctctatccacattctctcccaaggtgggtcatctagtttcatgactttaaatcctcccttaaactgttggttctcaaatatgcacttgtcacttctctcctaaactccagactcatgtattcagctacctacttgacacttctgtgtggatgtctagtaggtaataatcttagaattattgtgccctgtcaaattcctgctcttccctctaaaatatcttaatactattcagtcttccccatttctgtttatctcagttccttttcaggtcaaaaacctgagttatctttgattcctctctttctctcacattctagtagtccagttcctttcataatcagatcaattagtaagccctatcagctccatttttaaaatgtaactaggatcccaacacttctcaccatttccactactactctgtctcccacctgattctttcaggagccactcgattcgtttcctgcttctaccctcactactctacagtctattgtcagctcagcagccacggtaagcctactttcacttccctgctcaaaactctattggactcttcatctcagagtaaaggtctttccagtggtatacaatatccaatcatatctctccagattgcctaccttcctcccctcactccctccattccggctgcactggctccttgctcttctttgaacgcattaggcacatcctgctccaggacatttgcacttgatgttccctctaactagaatgctctttctctggatattcatatgtttctctcctcatcaccttcaaatcttttccctcatgtcatcttctcagagagacatattctgaccaccctctttaaactgtagtctttaccaatattctgtactacttattcaccatctctgcttttgtattttcttcttagtatttgctactttccagcatgatctgcttttccctaatattttatgatttatcacccattagaatataaggtccatgaaaacacgaaaaatattttctttttttttttttgactgatcccactgcctagaacagtgcttggtgcatagtaattagtcaataaatatttgttggatgaatgagtagatgtcttgaaagtcaaataggaaggaatatggtgatgtcatacaattttattaaaaaatatatgcatccctagtattctaagaattagcacatagtaaagttatagcctaattttataaactctaaaatcacttttatggtttttagctgctgtttttcaagataaaactccaaacaagtacagttttcagtatttcttatgatatattcatcattatttcaaatgcattggctttatggggcctgcacaatcatctttagataaaaatgacctcttatatttctgggtgactagacacaagccttaattaatttttaaaaagggattctatgcagaagggacagtgtttctgcctgtcttctttcacactttgcacacccaggccatctggagtgaaaatgaagtctgcccagagctgctggaagccccagctgccctgctgcccatggagtcctctgaggacgactccagagtccctcaactccttggaggagataagcagccaacacagtgttgttcagcagatgccaccgtctgccatgtaagttaaataaggcagacagcagcagctaaggagattttagcctcctgttctaaacagtattttagcttaacagcagaaaacgtttaacatgttcccccactcctagaaaaacaagcaatttatcttcagggagagggagaaaaagcactttccaccattctgatgggtcatcaagtttaaaagctctcttatccctaaacctttagagaaactaacagaaagtatgtttccctttccctgcagcttatttaccttgcaaattgtttgtctgcccggaagtgctacaataatggctacatatatatttttgtttccagattcattaatgatgtcagaagtgtaaaactaaaggcagaagactgttgttttcaagattgctccccaactaggcttggcgacccttgaaggcagaggacctttctgagttatctttgtaccctgcatagtcctggcacaaaatagcacctaagtcattcatttagcaaattttttaaaacaatattcctgtcatgacacattcagcaattatttatttatttatttatttatattatttttagaaacagggtcttgctctgtcaccctggctggagtgcagtggtgcaatcatagctgcaacctcgacctcccaggcttaagtgatcctcccacctcagtctgtagaatagctgggactacaggaatacaccaccacaacccagctcattaaaaaaaaaattctgtagagacaagggtgtcttgctatgtttcccaggctggtctcaaactcctagcctcaagcagtcttctcatgctggccccccaaatcactagaagtacaggcatgaggcaccatgcttggctataagcacatttttaatgagcacttagtatgtgccacatgctgcagatgtagccacaagcctctgacctcacagacctcatattaaacaagtaaacaaataaggtaattttagatttttttcagtgctacaaaataaaaacagggaaataggagagagagtagagaacaggactttgagaagaaagtctggaatccccaagaaggtgggtgtcagaaaagagatttggcacagaccccgcccctttttttttttttttttttaaccaccaggccctggaatttgaaccaccatcttctggagtgactcaaatgcagaggaagccaggcctgctgctaacgtttctgagaggcggcaagagtataaatggagatccacatatgtataaataaagagtgtgaatcaagctaacaaactgtttaataaaatatgatctaccctcttagcttgacaaatcaacttttcaaacacctggaagaacaagtttgcactcaggattctcagactcctcagagttctgcactgggatgtggaagggctgtgcaagccagcccttgggtccctgatccctgtctcctggcctgtgcccgtctcttctcagcctggctccaactcccattgagaggaagttcttgtacacatatgatactgcagcccttatgtctaatatttatccataccttctgcaaacagccactgtgtgaccacccttgggcttcccaggggtctgcaaactgacaatacagacaaagggaaccaaggcagaggctcacagactgtagaaatgggcttggggccatctgggcagagacttgtggaatcccaggtaagcagggcmtcttagtttgcttgtgctgcttaaatactatggaagaggtaatttataaatattagaatttatttctcagagttctggaggctgggaagtccaaggtccaggtcaaggtgctagcagatttgctgtctggtgggagctgctccctctgcttccaagatggcacttttttgctstgtcctctggaggggaagaaagcttagacgggcaaaagggggcaattatctctctgagacctcttttgtaaaggtattaatccattcctgagggctctgccctcatgacttaatcactttcccaaaatctcatctcttaatactacctcaatgaagattaagtttccatatgaattttgaaggggtcacattcaagccacagcacagagcatgacctagcagaggagacgcaagctctgggtgtgtaagtcccctttgctccatggacttcgtgcttcatgggaagggatgtggctggagggtacccctctacagcacagggcccagagcacccctcttgccttgggtttagggatagtataggtggtggtggtgaggctacttttgctcattaagaaaagcctctttgaggggtgggaccgagaatgtcatttgaatggaaacttgaatcataaagatgagtcatacaagccaagacttgggagaagggcattcctaaatgagagaagaggatatgcccagctctcataagctctgaagaagagtcaccaactgtggtgggtggagcctaattaagaggagaagaatggtaagagacaaggtgagatggtcaggcaggagcagggagcctggaggtcaggtaagggggcttgactttgccatgggtgcaatgggaagcctctggagggttgatatgatttgaattctgttacagcacgatcactctgggtgctgtgtgaaatggatgaatagcaaggagctgcagccaagagcaaatcaacagaagcaccactcaaaatgcctcagtacccattacataaggattcttgtgattaattcttccccaaaatttagagccaagaaaaatccagctctcctactgagagttgtagattagagcttctgtttctaatctacaaacaaacaaatgtgtgcaatgtcttttcatgacaattccaactttatcataaggttgtctactaagaaactagtaggcaggtttctcttgttgtctagaccacctgaaagctcatagctgagtttgcacttatttgcagagtaaactgctcatttatcaatctggcatccaatcacaactttttagctaactrtatgttttcataaacacttttctcacacagtataaattttaaataaataacaatagcaattaagtagtaacaactcgagactggtatctgactagtggttctttcaccagtgtgtacactggaagttttgttttgttttttgatgtttgtacattgtaattgcaggacaggtagtaagaagatttcaaattcacattagctttgctaccactaaattatggtgactgttcctaatttgcaaacaaatgtatgcaatctctttttatgattatcccaactttatcataaggttgttatattttaagacatatgaaaagatataaagtataatacagtgaatacatatatatctaactcccagtttaagaaataaaacattagcaaatacagctgaagctccatgaattcccctcccaaatcatactcccttcccacccgcagagggaacctctattctgagcctggtgtttatcaccaccaagaattaaaaaaatacttttactatatatacacaagtatgtaccccttagaaatgagtagtagtactgttttgtatgtctttacactttaagtaaatggtataagttatttcttgtttttgctcaaaattgttgaaatttatgccctttgattctatagctgactttcactgtgagtcattccatcattatttctgtattcattctcctgctgaagtacatttcaggttgttgctattcctctgctgatccccctcccccaacacacatgcttttattaataaatctgctggaacattcttgcatacatctccttggatgtgttgtatcataaaccacaaaatatactgagcttttcagacacaggttctacattaagtcattattttcagattgatttaccattgctcatattcaatcctttagaatggcctcaagaggatattttataatattggagcacaatccagagagggacagagtaattttaaaaatcagaattacagaatttttttaaatccctgtaaggtaccaaggagctcacctaatcgaacaccttcattttatggacaagaaaaccaatgctcagagggggaaggagttgtctagtagtgagcactgggctatcgggggaagcagataccttcattgagcctccactgtgatggacatgtgtacaaaccataaaaataagccccttgctttcccttctgttctctaagcctcactaaacaatgtgccatgaaacatagcccacttgatgaagtccttcctgaatgaattacaattgtgcttcctttatcaattcaagccacactttttttcatttttgaagagtcaatttcaccacagctttactgaagtagaagcaaagatcagaagataaaatagatttctttaccaagcataactagaataactagatttacaaaggacaattttttaaaaatcacaaaggagaaaatagagcataaagttggaagaatttctcagagcaaggatgagttcccatgactgggaaactattcagcttccttagttaagagtgaattttaaaatctgcatttcatttggtgagtttcaacaaggactctttccttgaccaaaccttaatcatgttcctctgaggcctcttcttgactaggcctggtcctggccggcagagcccagctcagcaagaatcccccgacccttaatacctaaccaaattctcttagtaatttcctatccactgaccccttcgccatgcccattggccataaatccccagctgtccctgctgcaaccagagtcaagattaatctctcccctgctgcagtagtcttgaataaagccttccttgcctgtttaattatgtttcatgctttttttcttcaacagattcacctcccaataccacactgtcactgagtccttcatcccaaactgcctgtaattaggatggccatgtgtagccgtttactgagacagtcccagtgcatgcctgacacagaagcacaataaccaatggctgcccaatctactctcaaaagtgccttggtttgcacaataaattgtcttcacacacatgaggtgtgaaatttactggctagagacactcattaagaagaggactttaaaaatggtgctacagcaatatacacagaacaaaagcaaattcatgaaactagaacactccctttttcatagtgcctccagaggcatagttacatttgatttatatcatattctatccaagttaagtgtttcaccataaataaaaattgattttcacgaatttctcattcaaacatattcatacaatgcctttattatgcctctcctttggcaactacaaatgggtttattatagaacactggccggaaatgtgacatgcattccagaaagagaggaagatgggggaaggagacaggtagaatggagatagatagaaagagaccaggaaggccaaggtagtataggcttcaggaaaaacagctgagattggggaatcgatacctcattttacagaaattgcattaaatgactgaaatgaatttgcaaaacaataattgaggctgacacctgctcttgacagaagggatgaatcaagactgagctgtgctttagcacctgctgtggtgagaaagaacaagaggggaactgctaaagctttttgcctagaaatgctgagttttttaattgctttctgaagccaaaagagaaaattcctcgttaaggtggggtttgctgagtgatttttgagcaatggtttgtttgtttgtcctagctacttccacgtatttgaaaacatttgcaagaggcccttattctgcmaagctttcttaggtctgatggaatgagatgagaataacaactgcacactcagtgagtaggatctcaggcatgggctttcagacataagatgtgatgcaggggagaggggaacaagttagatcatataatctccaaagtttcctctaactggaaagtctaaggttctgccattcagtggactctctacatgggtttgttaatcccattttacagaaggaaagattcaaacaaggagagagcaaggacaatgaaggggagcgggggcctcttcatcagtgctcagtatgtgacccacagggtcagactgacaatttagaaaagaggagccaaggccatcacaaggatgctctgctgaagcctcaaggaaacgtgatcccaccagcagcattgcatcacatgtgagctgcttagacatgcagaatctctcacccctcctcagacctactaatcacaatctgcatttaatgagaccccaagttcttcatatacacattagagttcgagaaacacaggctctggtttgcatttctctgatgattagtgatgttgagcagtgattacatttatagtagcaagactctagaaagtagttacaactatgaactagctttttaaaaatataattgcaactttattttagattygggggcatgcatacatgtgcaggtttgttacatgggtatactgtatattgtgtgatgctgaggtttgggatatgaatgrcccgatcacccagatagcaagcatagtactcaacagtttttcaacactttccccttctcttcctccctcctctagtggtcttcattgcctataagtgacaacatgtggtatctggtttctgttcctacaataatttgcttagaataatggtctccagctgcatccatgttgctgcaaaggacatgattacattcttttttatggctgcagcatattccatggtgtatatttaccacattttctttatccagtcccccactgatgagcacctaggttgattccatgtctttgctattgtgaatagtgctgcgatgaacatacatgtgcatgtgtctttttggttgaacactttgttttcttttagatatatactcagtaatgggattgctaggtcaaatggtattcctgttttaaattctttaagaaatctccaagctgctttccacagtggctgaactaatttacattcccaccaacagtgtataaaccttagcttttctctgcagcctcactagcatctgttgttttttgattttttgataatagccattctgactgatgtgagatggtatctcattgtggttttgatttccatttctctgatatttagtgatgttgagcatgttttcatgtttcttggccacttgtatgtcttcttttcagaggtgtccatgtcttgcccattttttaaatggggttatttggttttttgcttaattatttaagctccttaaagattctggatactagacctttattacatagtttgcaaatattttctcccattctgtaggttgtctgtttactctgttgatagtttctttggctgtgcagaagctttttcatttaattaggttccacttgtcagtttttgcttgtgttggaattgcttttgagaacttattcatatattatttcccaaggctgatgtccagaatggtgtttcctaggttttcttctagaattcttacagtttgaggtcttacatttaaatctttaatccatctttagttaatttttatatatggtaaaaggtagggatcctgttttattcttctgcctatggctagccagctatcccagcaccatttattgaatagggagtcctttccccattgcttatttttggaagactttgtcaaaaattagacagctgtaggtgtgaggcttatttctgggttctctattctgttccattggtctatgtgtctgtttttgtaccagtatcatgctgttttggttactgtagccttatagtacagtttgaagccgggtaatgtgatgcctccagctttgttctttttgcttaggattgctttggctatttgggctcttttttagttcaatgtgaattttataatagttttttcctaattttgtgaaaaaattctgttggtcatttgatagcaatagcattgaatctgtagattgctttgggtagtattgccattttaacaatattgattctcccaattcatgaatatggaatgtttttgtatttgtttgtgtcatctatgatttcttagcagtgttttgtagttctctctgtagagatatttcacctcctctgttagatatattcccaggtattttattttttgtctcgctattgtaaatgggattgccttatgaactagcattgacatagaattctgacattcttataggatcaggccagctttctaagctgggaggcattgtttcccatacagcatcctctactgaaatactaagctttcttttttacaatatgagtttaaatctggtaaaggtactgtagaaggagttaccatcaatttcaggctacagctgtctttccttctctctctctctctctctccctcctcttccccatctctggaggacagatttgcattaataatagttttgatttttaacacattgttagtattaattagtctactgttctatgtcttaagaggagaacaccagccttgcatgagatggagattatgaatcacagtttgtttggtagtttgctggatctccttgtccacatttactcctgacttctaattctgcattggctagaattttctttgcttaactaagcaggaaaccattttctctttaatttgggtactactacattctaattttattttactgatgatctgactagaaagtgacaaccaagcataaacctgtgttaataatttaatttttcttttattttctttgtatctggggaaggtactgcagaaattatttgttgtaaaacagttttgataagatctaacatatgggcaatcctggggaagaaaaaaaagaattaaatcacaggttttatgttgagctatatggaattgccatttttacaggttaaaaacaagtcaaatatgggcaatttcatacagttcagattaattagaatattttagtttagaatttcttgacaagaaatattgaaaaaatagaaagtgctgtttctggaggctgcattgtttattttacttggagacttgtttttatgaaattaaaaaaaaatgttttcagaggctagataaccatctttgtattctaagccaccataaagaatagtgtattagaaagtaaggttcagttatagattcaggatgaatgtatgtgtccttgaaggagatttattttttgcatgtgtgaaagaaaggtagatataaatggtgctagactttgacaccaaaaattagggcaagtttcttttctacttccttgtcacagtcaggtaaactctgataggagtaagaagagaagatatttcccctacagacccaccaccaagttaccaccactctagttggaaggtgggagagtatttgaatatttcaaagcaaagtagtccctttttggttaattattacaatcatactataagcatgctgagtctcyatggcactctgggcataattctatgacagcctgaactgcatcacagtgtaattgtgtgtttcaatgtctgtttttcccataccagcccaatatcacactttgagtagtaaagtaggaatcatgcttatttgtaatgatgtgcctagtgagtgccaagggagcttagcacacagtaggcattaataagtattttctttcaaatgtaaaagtttgttaaataaatgacttttaataacaagtcacattagaaaaaattgattatattaaaaatctttgtggagtatggaaatcaatttggcaataagtaagaatcctgtgaactagtaattataataaaaggtcacatctatgaactagtaattacaagatatttatcttagtctgaaatttgaaaatagcattaggtaaaaaaaagtttatgtcaacattatatatgagttataaaactgaaaacaacccaaaaacccaagagtacaatattatattatagagaaattaatgatgtttttggaatatttaatcatattggaaaatgctcaagaaaggtgggtcaaaaataaaaaatgatattaatgtcctgcttacattagttcaattagcattacatcaccagaatgtcctaagttattcaaatttctaccaaaatagtttttgtaatggctatagaatatgccattggatataaatattataaattatcaactgttttataaawatatatatatatatatacacatgtacacacgcatactaaacaatgacatatggatgagatcatatatgcctattgttctgcatcttccttttctcggttaacaatatactctagagagctcaccacacaagcgtgtgcagatctttctcacttctttttaatgccaggacagtatgcatttgcagagatatatgttgactttccaaaacaactcttattgatacttttaggctatttatagctttttgttattaaaaaaattctgtaagtatatacctttgatatatgtttttgtgcatttatacaagtatttatatagcataaattctgaaatttgctgaattaaagagaattttcacttaaaaaatttgaacagacgttgccaaattgctctccaaattatcacactaattaacattctcttctgtatgaaagtaactgcttcattttaaaatggaaataatgaatgggatatatttgtgtttatgtatttgtttgggattgaaatagagctcaagaacgccaatgatactatggcacaactgaagtaggtttttctccctccttccctatctcccttcccacctcttcttcctcttcaccttccttcaatttttctttccttacttccctctttcccctcttcctcctttctttcccatcattctaccttagtattttatctaatgggagaagagatagaggaaaaattagactgaaggacagtgaagaatctgaagaaagcaggaaatgggcttaagttggaagcagactgttgggaatacatggaaatctgcagagtggagcaagtcagacatactgaggaggacggacagtttggatatgattttctcatctggggaacttgtttaaaaatgaggtctgcagtagggcctaagattctgcatttctttctctcgttccctcccctcccctccccctcctcctctcctcctccttctctcctcctcctcctcctccttctccttcttcttgggtgggggtagagacaggggtttcactatgtcacccaagggtttcactgtgtcacccagactggtcttgaattcctggccccaagcaattctcccgtctcagcctcccaaagtgctaggattacaagcacgagccaccacagctggtcagattctgcatttctaatgggacctccagtgatactgcggctcctcatctgggaccacactttgaggaacaccaattagttgccataaattataggcaggagtgttcctaatcagtggtaaggactgtgatcatcactatttacagccaaggatgcctcctggaaatgtaacaaggggatgaaagcaatgagtgggagcagtgtatcactactgcttcacccatcagttgcaacctgtgctgaaaccagcaccaggaccaaacagctgctgcactcataccaatgcttagtttttcactctggcaggaacccttattgaggaatcaggtcaaattttattcgtttcatctctaaagctctgtcacagagtccttcaacatttccttgattcacataatatctggtgctgctgacactgtcctaggtttaagtggcaattgcttgccttagcttcagtcctgagggtgcccacaaactgcagctggtaggatggaagcctcaccccattattttctatattggatgagatgaacaaaaaggaaattattgcctaaaggcccagcattaaaatagtttgagtccaagcttgcaagcatctcaactttcatttgaaattttaagccatttttaagctcctctataaactctccatgttccactgaaatagtttttgaagtgttacattccagcaaagttaggattgttcctatatgctttggaaccaggtgcttttatatttaattcttcctgtgtaatagtttctttaccatcagtttttgcaaatcaaggaaagtacaaatgctaacttcaaaaaactcgcaagctgaagttgagaggaatattttcttcctctctgatctaagccagacagtgttggatgctggcatgcctaggttttccctctctcagtttccatctaaggacaggatgacataaagatactgtttttaaagtatcaacaaaaaaagcaaaaacaaagaaaaacaaaaaagcaaaaacacacataatcaaaatacaggcaggagctcaggcttggagccttaagaaaactagttaatgcatatattctcatttacaaaatataatcaaaaggacaacactcagaatagcacaggtcttaagaactttgtcacccagtgaagctgttaaatgtaccttctgtgtcatgcctaggatgatggcacttgcattcgagaaataggttcaatgtgagtaaaactgtgtgtttctctaaagctggggaggggaacaggcatgcagggttagctttatgagtgacagatacaaattaaggacacacaagaaaagtttctaatatggcagtattcactttagatttttctctaattaaggataattttaaaatacagtgattagcaattaggttgttttatgcttgattcatgcttttatttgaaataaaaagttctgtttaagtagaaaataagataggcataatgtttttttcctttttcagaaaattaggctgtttgaatcatatgtttatagtaaccacagaactactgtctgtctacctggtgtatgaaacaaaacaaatagccttttgagaattttctttgtatatccatatatagaaagccataaaaatatttatgcctttgtactgataactaaaaaaataaaagcataccatcaataacagactggataaagaaaatgtggtaaatatacaccatggaatactatgcagccataagaaggaatgaaatcatgtcctttgcagggatatgaatggagttggaagctattatcctcagcaaactaacacaggaacagaaaaccaaacaccacatgttctcacttacaagtggaagccgaataatgagaatacatggacacaggggtggaacaacacacactggggcctgtcgggggttggtgggggagggatagcatcaggaaaaataactaatggatgctgggcttaatacctggatgatgggatgatctgtgcagcaaaccaccatggcacatgtttacctgtgtaacaaacctgcacatcctgcacatgtaccccggaacttaaaagttgaagaaaaaaaaaaaagaagcatggcaagatatagaaacaacctgtgtttactgatggatgaatmcacacacacacacacacacacacacacaggaatattattcagctttaaaaagaggagatcctgccacttgtgacagcgtggatgaacttagaggacattgtgctaagtgaaataagccagacacagaaagaaaaatactgcatgatcggaatctaaaaaaagaaaacagattgcatacagcacatagaaacagagaatagaatggtggctgttggggggagggattaaatgggaagatgtaagtcaaagcatacacagttgcaggtaggatgaatagtctaaagatgtaatatacaacatgaagactagagtcagaaatattgtatactggtaatttgccaagatagtatattttaggtacttttattacatacacacaaagaaactatatgagatgatggatatgttaatttgcttgactacagtaattacttcactacgtatgtgtatatcaaggtacatgtatcaaaacatcatgttgtataccttaaatatgtacaataaaaaagaagtgaaataaaatataataagctcctcagtaatttccatcccttaagataatttataagttatttgtttgttgctttttaaactatttaacttgaagcttgtttgtctgctatatttggcattgaataatgagtgaataatgtaataaaatatattttaaaaacatgagtatgggagcttagaaaggcttgtcccaggacaactgaagtcaaggctgttttccacctatgatgctgaaggaattgctcaagtttcatggtgaagcaagaaacacagaagcatgatatgctccaagaatgtttttggtgtgtggtgggcaggcaagttgtgccagtttttcagctattatctcagctccaagcccactcttctgtatgccaccttgtgatgttgtgcccaaggctctgccaaccctattatagctttccagctgcttcctactaggtaggctctgccaataggaagtgctaaagagagattggaaagctggaagagaaaaagacttatcctacagtttctgtgaatgtcatggtgaatgacaagttgagaatggctgggtaggattccttttcaatatgtaacattcttaagcatagaggattttctcaaaagatttgttgtgcaatttgatattaaatcagctacaggtggaacaacctggtccttgtgtggaacatcagaaatgagcacaagagaacacagtattcttgatggttgttccatgagtttccacctccagctcctgctgtcgatgctgtaacagcacagaagataaacagtaacgtggtgcaaaattgtggttacagtattctacaacttccttaatgcaagacacacacacacacacacacacactctttttctccatggataaattggaagaaagcaatgagatatttctggagaagaatctggagattaccaatcagaatactgggtatagttaaacaaagagaattagatgtcattacaagaataaatgccagcattattgagttggcagctgacatctatttcccaatatattgtactgaaaagtaaatataccttaacttgaaaaccttttaaatgagttttaaaaattgccaattcatttattgttaggaaaacgcacaatgttgaaatgctacttggttcatatgtaaacctgtggggcaaaactgttattccaactttgcgctaaaatgctactgttgtaaaagcagtgtttgttgtaaagtccccttcttgaaaattcctaagattgttttgtttgtgttggtttaaaacagcaaaattttgcatggagacatggtaatatgaacattttcagatgtgttgctctgtctataacatagtgaaaacttcctatgtcttacttttcagaagaagatatacgtgtggccaacaaacatatgaaaaaaaactcaagatcatggatcattagagaaatgcaaatcaaaaccatcatgagatagcatctcacaccagtcagaatggctgtgattataaagtcaaaaaataacagatcctggtgaggttgcagagaaaagagaacacttacacactgctggtgggaggtaaattagtttaaccattgtggaaagcagtgtggagattcctcaaaaagctaaaatagaactaccattcgacccagtgataccattactgggtatgtaaccaaaggaatataaatcattctatcataaagatacatgcatgtgtatattcactgcagcaccatttacaatagcagacatggaatcaacctcaatgctgatcaatggtagartggataaagaaaatgtggtacatatacaccatggaatactatgcagctgtaaaaagtgagatcatgtcctttgcagcaatatagatggagctggaggccataatccttagtgaactaacacagtartagaaaaccaaatgtcacatgttctcacttgtaagtggaagctaaatgatgagaacacatggacccaaagaggggaacaacagacgctggggcctactagaaggtggagggtgggaggaggaagaggagtggaaaaaataactattattgggtagtaggcttagtacctgggtgatgaaataatctacacaacaaaccccccgacacgagtttacctgtataacaaagctgcacatgtacccctgaactaaaaaaaagtttttaaaaaaacttttgtctacttcccttacctctaatttttagccttcctatttgaactattctgaaacaggtgctcatgagcatcttaggggttctgaaacttggctgaatcacccttggccctattctagattagtagggatcaacttgagtttgtgctgtttgttacagatgtagaaggtacaattatgaggctgagttgactgaccattcaataaatattaagtgtcttctaaagaaacagattcaggctatgaatagattcctcagaggaaggagccctggagcccacactcaccctggtacccacactatacataaattgcctggactagttctcaggaaatttggattctaggtcttctctgtacatatgttgaagcttagaagatacttgtttcatctgtaaaatgggctcatgtctacaatgattatcccaccctcactcccccattgccccaaggtcatggctttccatgagtccattatgctaatcacttaasgtgttatctaattatttcaaccctggaaagcaggcattgttatccacattttatagatgactaaattaawccttgaagaggtaaagcaacctgcccaagatcataaaattgtttagtggcaagaaaaatcggagtccaagtctccctgacttaaagaaccgtgctcctaacatctcagggcaatgacacatcctcatccaactccacccttccccattttggctttacatgccctctcttggacaattcaaattttatggacaaaacccatgtcttcttgggtgactgtggcctggttgccttccgagcttttctatatatacctggtaactatggcaggttctaacattttcctaagatacgttacccaaccagttatttcaaatcaaaaataaattcaaatatctctagactttgtgggcttccattgaatttttcagcagctctctaaaacaacagacagtggtttacaatttttgctaaatctttatcttctctgggatgtttatcactagattttactgatttgcatacaacaaatatttgcaagaactatactcttcaaacatattcctttcagtgctgctctcaagtctcacttccaagcggcaaacgtcagctgccttagcacactctgtaacacttctgctcttccacaatcatccatgtttctaacattattcactcagcaatattaagccaacaccacagaatacaacaaggtgcttctatttgctttgttgcatttaattcaaggttcataataaaccaatgagagtaggcagcattaatgatcttttacatttaatggagcaggaagaggaagcccagaaaacttaggcaatttgcccaaagctacaggactagtaagtcacagaagtgatttaaaagtcttgggctttcttgtgtggggttgaggggggtgaacaaaggttggttaatggatacaaatatacaggtagatagaaggagtaagttctgatgtttgacagcagagtagggtgactatagttaaccacaatgtattgtatatttcaaaatagctacaagagaggacttgaaatgttcccaacacatagaaatgataaatgctctaggtcatggatatcctaaataccctgacttattacacactcaatgcaggtaacaaaatatcacatgtatcccataaatatgtataaatattatgcatcggtttaaaaactttttgaaaaaaagtgcagggcttctaaatctcctaaagctgatataattctgtacatatttacttaagcaaaggatgagggatcccaggaaccccactaatccacaggggagttatgagaggggaaaatagctatcagggtcaatagatatttccttctctcctaaccatggcttaggaaggaggtctatgatgctcatgctgtggagctagaagcaattactaggctgcatattttcagacatcccgtcaagggtattgacaacaacagcttaaaaaatgaaacaccttcattttagggcacagtctgggtgatgcaaactgcctaaggtgctgcattaatgttgctgtgtgactcctgtcttttcctgcatttgtcattcttctgtgcagatacacactgtattttttttctgcagatgttttagaagcagccaagaaacacatctccctgcagctgacactcaaaaggtgtgaatatcagcacctctgacatcgcttttcactttaaagtttgaaagtatatctgtcatgtataaagtaaaagtaagaaacaaagaagaaaaattgagatgcaagggatttttaaaataaaaatctttagaagataatagctaagtcgttcatcagtgaagttgtctacaaaatatctcgcatctaatcctgaaaattagtctttgaggtctatgaggtatctcctgtaatcacctcgtattaatcatcacattaaaacccagttcctcactggagccttgcatcttgtccagagaaaacaaacctatgggcacctgaaaactgtccctagaacccatttttcttaagcctaatcacaatccatttaggataatcaaatatctgaattatcataaattagtgagcaaacttttggagactcaagggtacaatagagaataaatactttttatgacctcatatttcattcattcatctattcactcacccaacagctatttattgagcactgaactttgtgctggggaatcggcagtgaaccaatgaatcctgtctaaatcatgtgtcttttttttcgatagaaaaatgcaataaggaaatcatgtaatcatatctacaggttgttttttttttttttttttttttttttttttttttttaaacatggtctcattctctcacccaggctggagtgcagkggcatgatcatagcttactgcagcttcactctctcaagctcaaccgatcctcctgcctcagcctcctgagtagctgggactacaggcatgtgccaccaagcttgattaatttgtctttttaatttttagtaagaatgactcttgctatgctgtctaggttgatctcaagctcctgagctcaagtgccttttaaaataaaatgttttaccctcttatttctgaacaaaagggtagttttatttatagaattcttcaggctgtctggcaaaagacccacttccttaatttactcaacatccattcttccacttcggcagataatattgtcaaaaaaaaaaatagaaagcatttttcttgtacccagatgttccagttcataaagaatcttggtgtaattttgagacgtaatgaaacatcactgtttgggacttgtgtttaatgagaacatcttcctgagctactgcaagtaggaggagaggaggttgttttaagacatatatgcttctgacagtagaagatccattttaccctggatttcaactaggaaatgactctatgccaatgattactttttttaacaatccaaataataatgccagagcccagcttatgttgctttgtttcttcccccaaagattcaattaggaaagagtatgtgaaaaatgaattttaaaatgcctttcccaggaccacagcagttagaacacttacacagacaacaagaatcccaaagttagagagtgatacaggccaaacaaacagcagaaagcattctggggggattaagtaacaccaagcatttcacctagtgcgttcgagcaggggtccccaacccttaggccgcgggccagtaccagtccatggcctgttaggaaccgggccacacagcaggaggtgagcagcaggtgagagagcattaccacctgagctctgcctcctgtcaaaccagtggcagcattagattctcataggaacacaaactctgtggtgaactgcatatgcaagggatctaggttgcgtgctccttatgagattctaactaatacctggtggtctgagatagaacaatttcatcctgaaaccatcccccaccctacccccacccaatccttggaaaaattgtcttccacaaaaccagttcctggtgtcaaaaaagtcagggacagctgcgttagatgatgcacaggttatagaaatcatccaatggcaattacacttaaattgagtcttgagaatcctcaggtgcgtgtataaacttttgcaaattataaaaggactctgttacaaagaatagattatcctagttcagagtagaatgggacatgcagaagaccatcaacaaaatgtgtaccatataaggaagagaaaaatgtagaccagatgggagaagtcatacagtgagagggtaattcctaattcttaaagacaggggtgtaaatttattgtgttcacttactcttgtcctctgcccccattcacttagccatcagaatttgtttttatctatttttgcattcataaattattctcatgccagagtgtaaagttgattacacacaacaaatccttgagctgctttagacaattctgagttaagaactgttttattgtattaagactttcttgactattatgggtaagattctactgcctaaagaataggcaaaccaacccagcagaaccccttactaaagactgatgaggctccatgttgagttactaatggatgctattctgcatcttgcctttcttagaatatcaataatagtaattgtgctttaacactccttgattaagaggtgaccataaaaatagaaagtcaaaacacagttaattaatgcatgacagtagagaagcatactcatcaaatcagccaagggcattcctgtcatttattcctctgagaatttaaatcaaaatctgccttcagttatttttccttcttcaagtgtcacatatttttaattttaaaaagtgagaagcaaacatttaattttaattaaaaccaacagattataaattctctaggtacttgaaattttaccactgaataacgttagacccttggaaggctacatagtttagttcattatagaacagctttttgtcaccaaagaaaccgcctttacaaaattcacactgcagttcatgcagaactattgaagatattgctgtgctcaatatgctctatataaaacatcacatgataagctctgtcttccctgaagaactggcagcacatttgcattcttgataatgagaactaggaattgtatcatgttttccctttttgacctggcttcctggaagctcaaactatatattcacacaacaactatggtcagcacactgacttcctcaccttccctttgatcttcactttctatagatattactttgttattagccttactatatattgcattttatgtaaaaggggattaaataaatgtctctcagataactctaatgagttaagccctgctcagcaaaatgtgctacacatatgcatcaactggcaacttgattttcaaatccttttgacaaagagttcgggaacaaatatattttcaaatgaaatagactttcagtctctcaaaggcaaagactattctatttctctctccactttayagcagtaagcactattctctgcaaacgcagtggctcagtaaaggatactgaaggcaacaagagttaacacttgtttattgagggtttggtttatatttcttgaaagttgatataacttgggaggctatttttaatcccaaaataggaggtacaggatacgaagaaaggtggaggacttctagtttctcattttccatgaaagtcacttagaaggcatcactccctcctaataagtaaaaggctgaacagagttttaaaaaaatcaacaactcttttaggatccattagagaggtgaggacacagggcaaacctctgcccccaagattggagacacaggcaggcaaatccatggagtcatggcttaccagaggaaactcacaagtagaaaccattgcggggaccagtgctggggtaggaaaacatgaactgtaactgatgaattcctggaggctcagtgtggacaaatcagaaagttaaaagctccaggtaaacccagttatacagggtccccataattgagtgagatatacctccaggagcttgactatgttatcccagtaaatatgggagaaacagctctccatgcttccagtagggggaaaagagaaggaaccattttgaactatgtcagtgcgctctgttcttcttagcaagccttgctcttaggagaagttagttaaccagagcctaatctactaatcagagcctaactggcccaggtgaaagaaaatgtccaactccagttagttctagccttccatgtggaagaagaaaaataaccagctctagcccactcaacatgagagaagggaaatacccaactatagcccactttagccatcttgcccctgagaaactgagaactgagaaaggcttacaaagttcacagccagaggcacagacacatttaaaagcagagaacttattcctaggagtgtagaatgcttctcctccccctacacttactgcaacattactaaaggcccatttacagcagagtttttactcagtgtaacatgtttggttatcaaaacaaaaattataagacatattaaaaggtaaaaaacacactttgaagagacaaagtaccagaacaagacaaggcagggatgttgaaattatcagactgggaatttaaaacaactatgattatgctaactctaatggataaagtagatagcatgtacaaaaagatgggcaacataagcagaaatcttaggatttcttaaatcctaagaaagaaccacatttcataagaaatcttaggatttcttaaatcctaagacagaaccaaaaagaaatgctagagataaaaaacaagggcccaagccaaaatggctgcctagacacagccaagaggaacatatcccatcaagagacggggacactgggaagactgggacactccaagcagatctttggagagaaggcattgagagtggatagagggaggacccagatgcttagctgtaaggggaagaagctgggagccctgcgtggggctgtcaagaaccaagactcattcctagccccagtgactctgagaaagggtgagttgaataggtgaggaatggcccactcttgccatcaacctctggaattctagcagcaggagaccccaagatctcaaaggacacttgagctggcagggagaactgttcagagaggtggacggggtgagattccagcctgtgcagagccaagagggtttggtgtagaaacatctgcagtggagccagggacaagacatgccaattccccaaggctcaccatgctcctttaggagactttaaccttagggagactgttggacctaggcagagcagggcaatcttgcctgtggaatggggccagtccaatctgagcactcctgtgtctgctggcttctcctggggccccaccctcaccatgcctgctagcagtgcagccttggatgcccaaccaggatatttcccagaggccctcatcatagctctttcaccagcaggccacagttgactgttggagaactccagcagacctgcccctgccaaaacacaccagctcacctgaagcttccctttgccgttttgttagcacgcactcaccaatgaccttcttacaattgtttggctgccatgcatgtgtagacagaccttccctccctcccccgccagtgcacacaccatagcactgcttctgctggtgtgagcgtaccccactgccccctccaccaatgtgtgggcaccccaccatgctgccaccacaaatgcatgcacagatgttggaaatccctcccctgctgccaccagcacaagcacacacacaaatgctggcaaccccacccctgcttgcaccccacccagccatgccatcactgccaccagcacgagtgggtgcaggaatgccatcactccattcccaatggtgctccaccccagctgacacatgtataccccatgactatgtctcagctgatggcatgtgcgcgtgaacacagatcccactgccattgccccaacagaactctttggccagcaccaactattggcatgttgtggctagcagaccgggaacacctcaacacccccctagtgcagcaggttcctaacctcaagggtccagagaacaaagctcaggcactggtaccagcctctagagttagagcacacagctcagcttattccataaacaaagccagatgcctgaaaccaccctgtaccacaatcaaactcccaagggcatcaaagacgataaaagcaaaaaacccatccacaagaaagcaacttcaaagattgaaggaacatcagcccacaaatatgagaaagaaccagcacaagaactctggcaactcaaaaagtcagagtgtcttcttacctccaaataactgcacaagttccccagcaatgattcttaacttggctgaaatgacagacgtagaattcagaatatggatagaaaagatcattgagattcaggagaaagtcaaaacccaatccaagaaatctaaggaatacaataaaacaatacaggaactgaaatatgaaatggccattttaagaaaggaccaaactgatctgatagagctgaaaaactcacttccagaatttcataatacaattgcaaatagtaataccagaatagaccaagctgtggaaaaaatttcaaagctcaaatgctggttctccaaattaactcagacaaaaataaagaaaaaaggataaaaaagaatgaacctccaaaaatatggaattatgtaaagagaccaaatctatgactcactggtatatgtgaaagagagggacagaaagcaagaattatgtaaagagaccaaatctatgactcactggcatctcttaaagagagggagagaaagcaagcaatttggaacatatatttaaggatattgtctataaaaattttccccaccttgctagagaggccaatattcaaaatcaggaagtgcagagaacccttgtgagatactatacaaagatgagcatccccaagacacagtcctcagattctccaaggtcaaaatgaaagaaaaaatgctaaaggcagctagagagaagggacaggtcacctacgaagggaaccccatcaggctaatggcagacctctcaacagaaattctacaagccagaagacatagggggcctatatccagcatttttaaagaaacaaaattccaatcaagaatttcatacccagccaactaagcttcataaacaaaaaacaaaaacacaacaacaacaaaaaaccctgagatccttttaagacaagcaaattctaaggaaattcattaccatcagacccaccttacaaaaggtcctttagggagtgctaaatatgaaaaggaaagacagttaccaactaccacaaaagcacacttaaatacatagaccgttgacactataaaacaactacacaatcaagtctatataataaccccagctaataacatgacgacaggatcaagtccacacataycaatattaaccttgaatgtaaacagaccaaatgccacaattaaaaggcactgtgtcgagttggataaagaagcaaggcccaactatatgctgtcttcaaaagacccatctcacatgcaatggcacacataggctcaaagtaaagggaatgagaaaaatctgccacaaaaatggaaaacaggaaaaagcaggggcactattctaatttcagaccaaacagactttttaccaacaataatcaaaaaagacaaagaagggcactacataatggtaaagggttcaattcaacaagaagacctaactatcctaaatatatatgcacccaacacagaagcaccatgttctgagagacctacaaagagacttagataaccacacaataataatgagagacttcaacaccccactgacagtatcagacagagcaccgaggcagaaaacagatattcaggacttgaacttgacatttgaccaaaaggacccgacagacatctacagaactctccaccycaaacaacagaatatacattcttctcattgccacatggcacatactctaaaatcaaacatacaatcagccacaacacaaattctcagcaaactgaaaaaaaatcgaaatcatacgaaccaagctctcagtccacagcacaataaaaacagaaatctctaaggagatctctaaaaaccatataagtgcatgaaaattaaacaatcttctcctgaatgacttttgggtaagcaatgcaattaagttagacatcaagaaattctttgaaactaatgagaacaaagataaaacataccagaatctctgggacacagctaaagtagtgttaagaggaaagtttatagtgctagatgttcacatcaaaaagttagatctcaaattaacaacctaacatcacaactacaagaattagaaaaacaagaggcaaaccaaccccaaagctgaagacaagaactaaccaaaatcagagctgaactgaatgaaactgagatgtgaaaaacctccaaaagattaatgaattcaggagttggttttttaaaagagtaaataagactgatacaccactagctagaataataaagaaaaaaatgagaagacccaaataaacacaattagaaataacaaatcggacattaccaccaaccctatagaaataaaaaaaaatcctcagagactactacaaacatatctatgcacacaaactgaaaaacctggaagaaactgatacattcctagaaatctacaacctcccaacattgaaccaggaagaaaatgaactcttgaaaacagaccagtaatgaggtccaaaactgaatcagtgataaaaagcctaccaacaagaaaaagtcccataccagagagattcacagctgaattcttccagatgtataaagaagacctggtaccattcctatggaaactattccaaaaaattaaggaggagggactcctccctaactcactctatgaggccagcatcatcctgataccaaaatatggcagagacacaacaataccctgatgaacatagatgcaaaaatccaggataaaatgctagcaaaccaaatccagcagcacaacaaaaagctaaaccaccatgatcaagtaggctttattactgggatgtaaggttggttcaacatacacaaatcaataaatgtgattcaccacagaaacagaactgaaaacaaaaaccacatgatcatctcaatagacgaagaaaagatttttgagaaaattcaacatatgttcatgttaaaaatcctccacaacaaactaggcattgaaggaacatatctcaaaataatgaggcatctctgacaaacccacagccaacatcatactgaacaaaaaaaaaaagctgtagcattccccttgagaaacagaacaagacaaggatgcccattctcaccatttctattcaacaaagtactgtaagtcctaggcagggcaatcaagaaagacaaagaaataaaaggcatccaaataggagaagaaatcaaactatctgtttgtagataatatgagtctatatctagaaaaccccacaatctctattcaaaagctcctaaatctgataaatgacatcagcaaagcttcagcctacaaaattaatgtacaaaaatcagtagcatttctataaaccatcaatgtccaagctgagggccaaatcaagaatgcaatctctttcacaatagccacggaaagaacaaaacacctgggaatatagttaaccagggagtgaaaattctgtacagtgagaattacaaaacattgctcaaagaaatcagagattacacaagcaaatagaaaaaatatttcatactcatgattaggaagaaccaatattgttaaaacagtcatactgcccaaagcaatttacatattcaatgctattcctatcaaactaataatracattcttcacagtattacaaaaaactattttaaaattcatatgaaccttaaatagagccctaatagccaaggcaatcttaagcaaaagaacaaagttagaggcatcacatcacctgacttcaaactatatcaaaaggataccataactaaaacagtatgtactggtacaaaaaacagacacacagaacaatggaacagaacagagagcccaggaatgaagtcacacacctacaaccatccgatcttggacaaagttgacaaaaacaagcagtggggaaagacttcctattcaataaatggtgttgggataactggctagccatatgcagaagattgaaactggaccccttccttataccatatacaaaaatcaactcaagatggattaaagacttaaatgtaaaacctaaaacaataaaaatcctggaaggtaatctaggaaatatcattctacacataggccttggcaaagatttaatgatgaagatgacaaaagtaattgcaataaaaacaaaaattgacaaatgaaacttaattaaattaaagagcttctgcacatcaaaagaaaatgtcaacagagtaaacaaacagcctacagaatgggagaaaatatttacaaactatacatctgacaaggtctaatattcacaatctataaggaacttaaacaaatcagcaagcaaaaaaccaacaaccccattaaaaagwgtacaaaggatatgaacagacacttcttaaaagaagacatacacatgtggccaacaaacatatgaaatatgctcaatatcactaatcttcagagaaatgcatatcaaaaccacaatgagataccatttcccaccagtcacaatggctattattaaaaagtcagaaaataacagatgctgaagatgatgcagagaaaagggaatgcttatacactgccagtgggaatgtaaattagttcagctattttggaaaccaacttgataatttctcaaataacttaaaaatagaactaccaatcatcctagcaattccattattgggtatgtatccaaaagaatagaaatcattctacgataaagacaagtgcaacacatgtgttcattgcagcactattcacaaaagcaaagacatagaatcaacctaaatgttcatcagtggtagactagataaagaaaatgtagtacatatacaccatggaatactacacagtcataaaaagaatgagatcatatcctttgcagtaacatggatggagctggaggccattatcctaagcaagctaacacaggaatagaaaaccaaatgctgtatgttctcacttataagtggaagctaaacattgagtatacatgaacacaaagaagggaacaacagacactgaggcctgctgagaggtagatggtgggaggagggtaaggatcaaaaactacctatcaagggccaggcatggtggctgatgcctgtaattgcagcacttttgggaggctgaggcaggtggatcacttgaggccaggagttcgagactagcctggacatcatggtaaaaccctgtctttactaaaaatgttactgtgatggcacacacctgtaatcccagctactcaggaggctaaggcatgagaatcacttgaaaccaggaggttgcagtgagctgagatggcaccactgtacttcagcctgggtgatagagtgaggctctgtttcaaacaaaaagaaaaacaaaagccacctataaattaaatgcttatcacctgggtgatgaaataatcttacatcacacccttgctacacacaatttatctgtataacaaacctgcacatgtagtcctaagcctaaaataaaagtgtaaaaaaatactgtaacagaaacaaagaatgcctttgatgggcttattagtagatgcaaaatggctgaggaaaaaatctctgagcttgaggatgtcttaatagaaacctccaaaacctgaaaaacaaagagaacacagactgaaaaaaaaaaaaaaacagaagagaatatctaaggattatgacactactacatacatacatagatgcatgaaaaatactagaaggagaacagagagaaaagaagaaatatttaaaacaataatgcctgagaatttcctcaaattgatgtcagacgacaacccatagatccaggaagcttagagatcactaagtaggataaacaccaaaaagaaacaccaccaccattaccaccaccaccaccaccaccaccacctaggcatattattttcaaactacagaaaatcaaaggtaaagaaaaaatcctgaaagaagccagagtggggaaaaccattttgcctatataggaacaaagataagaattacattagacttctcagaaatcatgcaagtataagaatgcttgtgatttttgtacattgattttgtatcctgagactttgctgaagttgcttatcagcttaaggagattttgggctgacagagagccaaatcatgagtgaattcccattcacaattgcttcaaagagaataaaatacctaggaatccaacttacaagggacgtgaaggacctcttcaaggagaactacaaaccactgctcaatgaaataaaagagaatacaaagaaatggaagaacattccatgctcatgggtaggaagaatcaatatcgtgaaaatggccatactgcccaaggtaatttatagattcaatgccatccccatcaagctaccaatgactttcttcacagaattggaaaaaaactactttaaagttcatatggaaccaaaaaagagcccgcatcaccaagtcaatcctaagccaaaagaacaaagctggaggcatcaggctacctgacttcaaactatactacaaggctacagtaaccaagacagcatggtactggtaccaaaacagagatatagatcaatggaacagaacagagccctcagaaataacrccgcatatctacaactatctgatctttgacaaacccgagaaaaacaagcaatggggaaaggattccctatttaataaatggtgctgggaaaactggctagccatatgtagaaagccgaaactggatcccttccttacaccttacacaaaaattaattcaagatggattaaagacttaaacattagacctgaaaccataaaaaccttagaagaaaacctaggcattaccattcaggacataggcatgggcaaggacttcatgtctaaaacaccaaaagcaatggcaacaaaagccaaaattgacaaatgggatctcattaaactaaagagcttctgcacagcaaaagaaactaccatcagagtgaacaggaaacctacaaaataggagaaaattttcgcaacctactcatctgacaaagggctaatatccagaatctacaatgaactcaaacaaatttacaagaaaaaaatcaaacaaccccatcaaaaagtgggtgaaggacatgaacagacacttctcaaaagaagacatttatgcagccaaaaaacacatgaaaaaatgctcatcatcactggccatcagagaaatgcaaatcaaaaccacaatgagataccatctcacaccagttagaatggcaatcattaaaaagtcaggaaacaacagatgctggagaggatttggagaaataggaacacttttacactgttggtgggactgtaaactagttcaaccattgtggaaktmagtgtggcgattcctcagggatctagaactagaaataccatttgacccagccatcccattactgggtatatayccaaaggactataaatcatgctgctataaagacacatgtatacgtatgtttattgtggcactattcacaatagcaaagacttggaaacaacccaaatgtccaacaatgatagactggattaagaaaatgtggcacatatacaccatggaatactatgcagccataaaaaatgatgagttcatttcctttgtagggacatggatgaaactggaaatcatcattctcagtaaactatcgcaagaacaaaaaaccaaacacggcatattctcactcataggtgggaattgaacaatgagaacccatggacacaggaagtggaacatcacactctggggactgttgtggggtggggggagtggggagggatagcattaggagctatacctaatgctaaatgacgagttaatgggtgcagcacaccagcatggcacatgtacacatatgtaactaacctgcacgttgtgcacatgtaccctaaaacttaaaagtataataataataaaataaaataaaataaatcatgcaagtaaaatgaaagtcgtgtgaaatacatacagttataaaagaaaatcccaccaacctagaattttgttccttgagaaattatccttcaaaagtaaaggagaaataaagactttctcagacaaacaaaaattgagggaatttgttgctaggagacctgccttgcaagaaatgttaaatgaaggaaaataacataggtcagaaactcaggtctacataaagaaagatcactgaagaaagaatcgatgaaggtaggttttacagacttttatttttcttaatctaacagacaacctgttctaataataatagtaaaaatgtactcaatgatgtatgcttatgtgtgcatgtgtgtgtgtacatatattttcttatgtatgtttatatataaatggagtgatggtaattatagaagggatggaggagagaattaggattattttgttattataaggtacccacattacctatgaagtggtataatgttgtttgaaagcagacttgggccaggtgtggtggctcatgcctgtaatcccagcaatttgggaggccaacgcaggtgaatggcttgagctcaggagttcaagaccaggttggacatcatggtgaaaccctatctctacaaaaaatacaaaaattagccagatgtggtggcactcacctttggtcccagctactcagggtggctgagttaggaggctcacttgagcccaggaggtcagggctgcagtgaaatgaaattgtaccactccactccagctcagcaacagatgagaccctttctcaaaaaaatttaaatttaatttaaaaaggaaagtaaacttggattagttgtaaatgtatacagccaattctagggcaaccactaaaaaaagtataactgatatgttagaaaggagagataagggaatctgctcaattaaaaccataaaaagaaatcaatagcatactagttaaaaatagatggtgtatccataatataaagtattttgcaacagttaaatgaaatggggcagatatattaactttatgtaaaaggcaatctattgtttttagaaccaaattggccttaaaaattgtttaatgcaaaaaaattacacataacaaaattacagcctcacaatatgatgtgcactcatttctaacttttccttcatgattcgcatgataacgtactacacgttgagtatccctaatccaaaaatccaaaatttaaaatgctgaaaaatctgacactttctgagcaccaccatgaagttcaaaagaaatactcattggagcatttcaaatttcaggttttcagattaggcatgctgaaccaaatattcccaaatccagaaaaaaaaaaatcccaaatctgaaacaacttctggtcctaagcatttcagataagggatactcaacctatactgactattcaaatcagccttaaaaatctttattttccctgtttaaaaaaaaggcagaaaggactagaagatagaaatggaacaaagaacagagacaacaaatagaaaacagtaagaaatagggtagatattaatccaactacatcaataatcactttgaacatcaatgatctaaatgtaccaattaaaagacagaaattgtcagggtggatcaaaaaacaaaaaacaagatccaactacatgttaattacgagaaactcactttaaatataaagacacaattaaaagcaattggttggagaacaagataccatgtgaaaactcattaaaagaaatcaaggggagccttaataatttcagacagagcagatttcaaagcaagggaagctatgagggataaataaaggcattacatagtaataaaggggtcaattctctaagaagtcaaaacaatccttaacacacatgttctttaatgtgtatgtgtctaacaacagagtgtcaaaatacatgaagcaaaaactgacagcactgaaaggaaaaatagataaatccactatcatcattggagacttccaaaatccttctttcagaaatagacagatacagcagatagaaaatcagtaaggacatagttgaacttgacaataccattgatcaaaaggataaaactgacatctacagactacttcattcaacagcagcagaatacaaatcttctcaagctcacatgtaatattcaccgagatagaccatatttagggccataaaagccatagactttttttaaaaacagaaatcatacaatgtctgcactcagaccacagtggaactaaattagaaatcaataacagaataactagaaaatcctgaaacacatggagattaaacaacacacttctaaataacacatgggttaaagaagaaatctcaagataaattttaacgtattttgaactaaatagaaatgaaaacacaacttatcaaaatttgtggatatagtgaaagcaatgcttaggaaaaaatttatagcagtgaatacatatattagaaaggaagaaagatataaaatccataatctaagtttctaccttagaaaaagaaaaagcaaatttaatcaaagtaagcagaaggaaagaagtaagaattagagcggaaatcaatggaattaaaaatgggaaatcaatacagaaaatcaagaagaccaaaagctggttctttgaaaagatcagtaaaattgctaagccactagacaggctaattaagaaaaaaagagagaacacaaattgctagtatcagaaatgaaagaggggacatcactatagatgtaagaaacatttacgagatcataaaacaatactatgagggactctatgtccacaaatttgataacttagatgaaatgcaccaattccttgaaagacacaagttgctaaaactcatacaagaatagactatttattcaataaattgaatcaataattaataaccttccacatcagaaagcaccaggcccagatgggttcactgttgcttctaccaaacacttaaggaagaaattataacaattccctacaatctctttcagaggatagaagcagaaggaatatttcctaactcattctatgagaccaccatcaacctaaaccaaaataaaaaccaaaaccaaagatgttataagaaaattaaactacagaccagtatttttcataaacatgcacataaaaagttttaacaaaatatttgcaaataaaatccaacaatatataaaaagaattatacaacatgaccaagtgggatttatcccctctaagtgaggctagttcagtgttcaaaaatcaattaatgtaattcattacatcaatagactaaaaataaaaatatcacatgatcatataaatagacacaaacaaaagcttttgacaaaatacaacacccattcatgataaaaattctcagtaaactaggaatacaggaaaaattcctcaacctgataaaggatatctacaaaaaacttatagttaacatcatacttaagggtgagaaactcaaagcttttccaactaatgtcagttacaaggcaaaaatgttctctctcaccacactttttcaacattgtactggaagttctagctamtgcaacaagataaaaaaggaaataaatatataaagattgggaaagaagaaataatgttctccttcagtgatgacacgattgtctatgtagaaaatttaaaaaaatcgataaaaagactgctggaactaataagtgattctagctaggttgcaggatacaaggttaatatacaaaggtcaatcacttttctatatatcagcaatgaataagtggaatttgaaattaaaagcataataccgtttacatcagcacccccccaaaatgaaacaggtataaatctaacataatatatacaagatctatatgagggaaattatgaatctctgatgaaataaatcaaagaagaactaaaaaaatggagagagattttatactaatggataacaagacttattattggcaagatgttagttctattagctggacatagtggcacacctctgtagtctcagctacttgggagcctgaggcagaaggatcacctgagcccaggagtttgaggctgcagtgagctatcatcacaccactgcactccagcctgggctatagagtgagactctatctctaaaaaaaaaaaaaaaaagatgttagttcctcccaacttcatcaatagatgcaaagcaatcccaataaaaatcccagcaagttactttgtggatgttgacaaacagattccaaagtttatatggagaggtaaaaaaggtttagaatagtcaacacaattgaaaacaaagtttgaaaactaacaatatctgacatcaagagttaccataaaggtacagtgatcaagacaatgtagtattggcaaaagaatagacaaatagatcaatgaaacagaacagaaagtccagaaatagacccacataaatgtagtcaattgatctttgacagataacaaaaggcaatgcagtgaaacaaagacagtcttttcaataaatggtgctggaacaaccgtacatccatatgcaaataattgaatctcggcacagaccttacacccttcacaagaattatctcaaaatggatcatagacctaaatgtaaagtgcaagactataaaactcctagaagataacataaaagaaaacctagattaccttgagtatggcaatgactttttagatacaacaaaggcatgatttttgagagcaagaaatgataatctggaccgctctgtgaaagacaacgtcaagagaatgagaagacaagccacatactgggagaagatatttgcaaaacacttatctgataaggggctattatgcaaaatatacaaagaactcttaaaactcaacaataagataacaaacaacctaactaaaaaatgggccttaacaggtacctcaccaaagaaaatatatagatggcaagtaagcatatgaaaagatgttccatatcatatgtcatcagggaaatgcaaattaagacaatgagatactactacatacttattagaatgactaaaatctggaacactgacaacaccaaatgctgacaaggatgaggagcaacaggaactctcactcattgctggagggaatgcaaaatggttcagccattttggaagacagtttggaggatttcttgttttattttgttttttgtttttacaaaactgcacatatttttaccatatgattctgtaatcacactccttggtatttacctagaggagttgaaaatatgtccacagagagaattgaacatggatgtttatagcagctttatttatagttgtcaaaacttggaagcaaccaagatgtccttcagcagatgaatggataaactgtggtatatccagacaatgggatattatacaatgctaaaaagaaataacctattaagccatgaaaagacatggaggaatcttaaatattactaagtgaaagaagccaaactgaaaaggggcacatactatatcattacaactatatgacattccagaaaaggcaaaactgtggagacagtaaaaagatcagtggttgccaggggttgggagggatgactaagcagagtacagagtatttttagggtagtgaaactattctgtatgatactatagtgatggatacatgacattatacattggttgaaacccatagaatgtacaacaccaacagtgagccttaaagttaactgtagactttgggtgattatgctgtatgaatgcaggttcatcagttgcaacaaatgtaccatcttggtgcaggacattgataatggggaggttatgcatgtgtgggggcaggagatatatgggaaatctctgtatcttcctctcaattttgctgtgaacctaaaactaaagacaccttttaaaaaaagaaagggaagatcttgatttttccagtaggcagttatctgatcttacagagtttggcatactagtagaaatctaggtgcatggttgaaagctgtctcaagcctcctgcatcaagtgctgggtggggtcacagagagtctggcagcatgacagcagcaggggccatccctgggcctagaacactaattgacaattgtctagtcaacaatgactttggcaagagacaaaggagacagaacccctgacctgggtagcagcctgggcttatgtaagctgcattctccctgcttctctcaagtctcagctagttcactgattttcaccatggagaacatcacaatttcttgagatcagaacattgctgctgacaaaatacagtgcaaaataattctgccttcttttctcttacgagctgatacaacagcagaggcactcctgctatgtctgaaattcctcttgcctctcatttttgacctgacactggtgarggtgcacacattttgatgtaagtcaggaccacacattagctcagtttcctacccatgctgccaggcatcaagggtaagtctatgaccaagaactgtaacagggctctgcccaatagtgtaattaacagtgcaaaacagaggctgagccatttctgacttgcatgggaaaatacatttcagtgtctcataattatttgtctgttcagagacctggataatgagttggctttcttcagacctcctggaaaactcactcagttgtctgcttcaatcaaaggccctgtgttttaactgctggtgtcaagaatttggacactttgacttgcagagataatgttaagaaatcagagttctgtctccatctttggatgacaggtaaggcaaagatgggcctgctttttcccatttctccaagctgtgttgcaccatgatagtgaagtcagtagcactgggtttgtcttatcaagaacctctgggtgataacagaccatcctgagaataatctgtgtgaaagtcaggtgtgccctggaccagttgttgctgagatacaagctgtgatgctgctggcaggtctggaactgtacaccacctagaacctgagacctaggcacaggagtggacaaaaatttctaatgggagagcataaggcttgtcctctttatctgtcacaggtgacactaagcaaaaaaggttacaaaccaaatcccgtcagtcacctctgttctacaggtggaggtcctttggaaggcatttgatgctactgccatggtctgtgcaagtgccttccaaacactcatacctatccctcatgaccaagggagaaaagggcctgtaagaaagtccttccaccacagataataaaaacaccttatgttatagactgaactgtgtatcccccaaattcatatgttgaagtcctaactcccattacctctgaatatttgtatatttgtagaccagggcttgaaagaggtgattaagttaaaacaaggctgttattgtgggccctaatctaatctgactggtgtccttataagaagaaatttgaactcacagagacaccagggatgtgggtccacacagaaaaaaggacatatgagaacactgaaagaagacagccatctgtaagctaaggagagagccctgaggagaaaccaaacctgctggcaccttgatcttggacttccagccttcaaaactgtcagaaaatatatttctgttgtttaagcaacttggttatggtactttgttatggcaacccgagcagactaatacacctgatttttctgatgagttctgatgagtagctttaatctgggaggggaaaggaatgtttttaatctccgttttatagttctgcaatttatttattactatctacccttgcatttcacaaagcatttgaggaagcctaaaagaacatatattatactatacaaaacattaaactaattagttgaaatcagggtagaggaaaaataaagtcaggaaagtcataatctaagagtaagattarcacagaaatgcataccatataggcggggcgcggtggctcatgcctgtaatcccagcactttgggaggccaaggcgggtggatcacctgaggtcgggagttcgagacaagtcagacctacatggagaaaccccatctctactaaaaatacaaaattagccaggcacggtggtgcatgcctataatcctaggtactcaggaggctgaggcaggagaatcgcttgaacctgggaggcggaggctgtggtgagcctagatcaccccattgcactccagcctgggcaacaagagtgaaactccgtctcaaaaaaaaaaaaaaaaaaagaaagaaagaaatgcataccatataatcttcgaagacagaggtaaatttgattctatgattcctagtggccaaagcagaaaagatgatcagtatgctcaccaactcaaaccctaggattaaaaacaaacctgctactcaggaaaaacagcttcccagatactaaggcagcagagaaagagaacattgcaatgtggaggaggaagacctgaaaacatggcatgatacagaaggtgacaatatttcttgtcatatccttaattgaaatcaacagcatgaaatcagaacacactcaggacaaacaactgggagtgagagcaagtgggcagaggagacctctctccccttaaatgtcatggtcatgaaatgggtggattcagtagtaagatttagaagatggggagaaattggtggtggtcacatctttccagcaaacctttatgaatatgaatttttgccaccaggttttttatgaatattggacagcaaagaactcatgatagtttctatggcaggaacatggaatgcatgtaaatctatatcatgtccagagaaagggatacccctgggatgaagtggagaatgttaaggcaaaccaaaatctcagccttccttacataatattactggtataatagygttctccaagggctgagatgccasgaggaagcacaaatcagaatgctctggagttagaccaaggtgggctggctcagcttggcatctggagggttgaaggacttgtggcaagtaggtcaaatccacagcctttcccatgttgatagagggaggatagcatttctgagatactcttataattcagatatccccggggccttaaaaatcttagatacaagtaggcttgaaacaaagatctttggcagggcgcagtggctcactcctgtaatcccaccactttgggaggccgaggcaggtggatcacctgaggtcaggagttcgagaccagcctggccaacatggcgaaaccccatctctactaaaaatgtaaaaattagccaggcgtggtggcgcatgcctgtaatcccagctactcaggaggctgaggtgggaggattgcttgaacccaggaggcggaggttgcagtgagctgagatcayaccactgcaccccagcccggatgacagagtgagaccttgtctgaaaacaaacaaacaaacaaagaaacatctttggaccatccttgaaacagataaagtgggccatgggtcccattcccatgatacacccttacctcttgttctggaggcagggatctctgtgtctgctgaacaatccttggctgcaccaaagagcatgcctgctcctatgagattacctttccctgcagtccagcttccatgggcacagatggacagaaaaaaactgctatttcatatggagtgggcaatactagggctctaatattcttccagtttttctaaggttttgcccattattctgcacctgactctacccagagtgcttctggccgctctgtttgtgcattcatgttgcacaagggtgacttacctgcatgtgcccctcacaccccaagggtcttaatgaaggacaggtgaaactccttgattctacccccaccttatcaagaatccaaaataatctctttgtaaattttttttgtcaatatcttcataccatactgtcagagtaaacttgcctcctttctgagatcccaggcattggaagtccagatatggcagtttatcctgagaattgaaaggttcatgttgcatgcttcctttttctaatttggcaatttgaaaactattaggcaaaactcaatgatagagaaataaaaacaaaacttcctgcttagcctgtagtacctggtggtgtttagggttttcaacaatgaataatataatatakatatttcaaaatactataggaacagctgtatccatttatttaattttatcataaaacatgcttaattgtttaaaaatatctagccctcagctgggaaaagtacactttactacaattcaggcatggtcataatggaaatcaaatacatgtaacatagtttacttacagctctaagaagaaaaaagaaacatgaacaagaaagagtaaacaggagctactaggaacactgaagaagccttggcactatgaacataaatactgcccaagaagtccttgaactctgctcccacatgccccctacaccccaaccctggccatctgttttgcagttgataagagctaatgggtctgctttaggattgtttgcttggaagcaggatttcaaatttgtgtagtgaaaaaactaacagaacaaatattttcatagtcaatgagacactaactcataaagtcagggcctgcagaatggcaattgaagtggccaagaaagaggggtagaagggatggtatttattgggtgaccacttaatacacaatatagtgctatttttaattattcctccattgtacaggtgaagaaactgaggctctgagaagtaaagggacttgtctaagaccacagagtaaaagtagccaagttgcaaacccagattgttcaggtcctaaaatccacattgttctcattatagcgatttatctctctgatgcttcccatcattactgaaatggagcaaatggaattagggtacaaatgtgttaagcatcagctggcacagacatgcgtgcacacacagaaattatttatttagaaaacaataggcaaggatgacttttgtgaagaaagatgaaagcctgaggacatagttattagtaaagaagcagaagaatgactcaggtgcccgcatgagaaaagtttgttttgctcttgagaaacgtgggaaagtgagagatgccagaaaactgaaatggagctggggatgaagactgtttttcaaaatagagaagttttattctccacctacttggagtgcccttgggagacagatttcagccatcagccctcttgaagaattgccctcagctgagctcagctcaagaactgcctcatcagggctcatgcccttcctgcattcctgcagtgagtgactggtagacgcagggctcttgagctcagccccctcaatgaactctgcaaggccatcccaacttcagtgcaccctgtgctgttgaccaggccttgctgagatggtaccacagcccaccttctctctctacccactcctgtttccttccttgcccctatataaatggatccagagagctggccatccccagaaacctttccacatgaaaatcatctcagagcctcctttccaatgggcccacctgctaaagagcatttttaaagaacagggatgcctaatgattagtttgaagttgcttatgtccttgtgacatgaggcttttattgctagctttcaaattttcaaaaaagtcaagtgtactcacagaagatttggatgaataggagtacatttttcagggttctctagagggacagaactaataggatagatgtatatatgaaagggagtttattaaggaggattgacttacacagtcacaaggtgaagttccacaataggccatctggagccaggaagccagttcgagtctcaaaatctcaaaagtagggagggcaacagtgcagccttcagtctgtggccgaaggcttgagagcccctggcaaaccacttgtgtaagtccaagagtccaagagctgaagaacttggagtctgatgggcaggaagcatccagtatgggagaaagatgaaggtcagaagactcagccagtctagtccttccacgttcttctgcctgcttttattctagccatgctggcagctgattagatagtgcccacccagattgagggtaggtctgcttctcccagtccactgactcaaatgttaatctcctttggcaacaccctcacagacacacccttgactggatttgcatccttcaatccaataaagttgacactcacttaaccatcacagggagtattggggaaaatgaattaaaagcctagatttttcactctgcatcaatatgggtcagaatggggacaatagagacagaagcccagaggatgagatcatcacagcacccaagagtttgtagaagtcttaggaaaggctttgagctaccatagggcatgtcctaagggcttaagtcaaagttgcctagatctggagaggcagggacaagctggctgacatctgggctacagttatgctagtgaacctccgcttcagagaaagatgataagtcattcctggagcagggaaacaaatacaacaggtccatttcagggagaagtgcatgaatctgctcactcctttataagagatgggcctcctcctctgaacttccagagtgctggctccactccagtggctcctggcatttgccctcagtcttgtaaatcacacttacaggtgtccggtttccctagctaggttgtaaggtgtctttttgttctatgccccaaagcacaatgcctcacacctaacagactctcaagaagaattcaattaattgcttccaggccttgagacagctgagtaagaggtctgacaggctctttaaaggatctcttaaaaccgacatataaatttagaaccactactctttgggtaaggaacccttatttgctgattaccaagcttttgttacgtacaaacttttgttgttttgaaattgaaatgctgatttcaatcagcagtttcttcagaaacactgcctgatactgaccttttattttaaaaagggaatgttggaggtacaactagcactttttcaatgagatttggaaaaggaatgagaaaagaaccatcactgcatctgtttctccattaaagggttacttcaatcagtgaaacagaatgagctttgttcataaagcacttggaaatcttgaaatagtaaaatagtacattctagtgatmcacacacacacacacacacacacacacacacagtaatagcctgagctcagagaatgagatgctgtcaaaatacaaataccaatacctgccaattcagaaaagcatgtgaaagggcataaaatatgacagcagacagaccaaccctagaagccagctttggtcttgggtgtttaacttaacctctttgaatcacagcttctgcatctctaaggtgagttggtttgtacttatggctaccaaatgaaaacaaataggttccagagcatgatgccaggtacataaaaggcctgtggtaattaagaggcttctttagagttcctgatgagatctagactttagcatcactcagctcccactgttcccatctcatcttggcagtactttccagctctggttttagaattaactacacttctatttgaagtgtagccttgccacttactagctatatggcaatgggagggtttcttcacctcttgaaatacaaactctttacctataaaatggagaatcctccgcacctcacaggtatatggtgagaacttcaggaaacagaaggtgtcttagcacactccctggcacaaaggaggcatgcattgaaagttagtttccctccatataaacattgctatggctttggtccagttcaaaawctgagctggtacgattataaacttcatgttactaccctatcttaggaacatttttagcaagtgcttaatgtctcaccatcatttttacaagtgattgctactgtaccatgagctatatatcaggttaacaagaaggacaataaagatcatggacttctcatgttctgtttagatcttcctgtcaagatattcctgtgattgaaagtgaaggagaaatttcaagaacttgtgaaccggctatctgagactgaatcagttatgaggtctgacctcactgttatttatagaaaatccctgtgccttctgcagcctctaaatagttgacttcagccctcacggcagcactataccagggctgtgctctgacctggggaggagaacaggcatctatgacacagatgcaaaaatacagaaacctgttttgaccatcagcagtggcatgcactgtggtagccattcaatataccagggcatgagacagttctatgaagaagatcaccttacccctcatcttcctctataaatactataaacacaatgtccacatataggagaagcaatgtccacttgggcatgatgtgcatgtcactacactgatctctatggcattaataatgccagactaatgtctgatctctaggcattaataatctaaaactgatgacaccaaaatcagcagccctggaaaggtgattcctcctagatattagagatttagaacaccacaaacccctactcctcattaagataatttaaacaaaaatctctggctaaatagctaaatgagaaaaaaaagtatcgcttttattaatctttgcaagcaacaccatttgactcccagtaagcaaggtttctggaaagctgtgttggatatctcagctgaaacctgaggctaaaagtggtttcttcccttccactccaaatttagatgtggggacattttgtgcactttaatctcaagtgtgtttgctgtaagacatgaaaatatagcttcctaaattccaaaaaatataccaaaagcaagtaaaatagaccacacaatgaaatactacatttataaaagacaaaagtagatatacaatagatggatggatggatagatagataggcagacagacagacaggcagaataaactccaaaagtttgataacgtactttgtggggaaacaacactctcatactttgctggtgggaatgcaaagtggcatttggaaatacctaccaaaattatgtatgcatttattctctaactaagcaatctcacttctagaaatctatctcaaagatacattggcaataaaacaaacaaaaaaccctgaatgtgcaaggctattaattacagcactattcgtactagcgaaagactgcaaatactcgtatgtccgtcattaggttacaggttgaataaacaatagtacatctacacagaggagaacttggaagctgtaaaaagaagtgaagaatattgccatatactactgtgctccagcatatattactaaataaaggagacaaaatgtatataatatgttaccaatttcttaagcagcaggagagagattcatttatctgaatatatttttaaatgaaaggatgagccctgaaatttttaaacatggaagggaggaaatagggcaagggatcaaggatagaagctagtcttcattaaatatggcttttaatagatctgactttggacccatggaaacatgttacataattaacaaaagtattaaaacaaaagctgtttaaaaaaatgtgaagcaaaagaaatcaataaacctgtgtatacccacacatacagtgtgattcagctgagtgtagaccagcacgtgcatgtgaggagattactgagctgagagagggaaggacacgagaggatgagagagaatagtacttggggctcacattgggccatgaatagtgcctcttcagaccttcatacttgccaaactggtaaacctggtcattcatcagccattgcatagagaacccagaagggtcttgctgcagtaatgggaaataaccagctgtagcctaaatgctgccctggtcccacataacaaagctcaaaagtaaaaaccaaaagtatcaaactgcttccaagcaactaaaacaaagatcccggctatttattggaatacagaattatccaacacccacacagggtgagttttaactcacaatgtcaaagacatcaaaataattagtataactgtactctacttgttaaatagaggaaatattgaacatgttaaacagagacaagaaagatgtaacaaaaagactcaaaccaaacttctagagatgaaaacttaatgtctaagatgaagaatacactgaatgttccagtcaattttgctatgaatctcaaactgcttataatgtctatttataaacatacactgaatgagattaacagtagattagacattgcagaagaaaagattaataaattttaagacatagcaaaagaaactatccaaaatgacagacagagagggaaaaaaaagccttaaaaaaaaagagcatagcaccagtaagctgtgggacaacttcaaatagcctactatatgtgtaattgcagttcctaaagtggagaacacgtatccctacaaagattatttttttcctgtgctcactgcatgaattggcaatgcaaaggtgattcagagaatgtcaccagaaaatgatgccatccctgtcattaaactgtttcttagggcccagatgtttttcaggtccctgacttccaattggaaaagtgggctcagaagctcccccagattctcaggccttttccattattgagctttttagtgaggtggatctgatccctagaaatctcaatagagcaagatgaaggagactccctctactcacactgtttccaggaactaaggcctcccagccattgcaaaaagctgacaagtctgacagggaaaccagcagttcagcctcaaaattttctgggtagcaagtttctctaacagcagactcttactggggacagaaaccttcgggaccgctrctagtgaggtgcctgtgactttaatgccagacctgagtctccttgtgacagttctgtggagaatgaagttattcaaaattgcaaggctctagcatatgactatgcatagatctagatccatattcataactaactatccagttacaatgggggtctatgatgctaagtgatgatttcactaatatgacattataaaaaggaaaaactatagggacagaaagtagaccatggttgtgaggtacagggtatggtgggaggagctgactacaaagggggagcacagggaattttcggggacagagaaccgttctataataatcttgattgtgctgataattatacgactatttgcacttgtcaacactgatagaactgtttactaaaaagagtgaatcttattgtatacaaatcaaaatttatagaactatatataaaaagaggtgagttttgctgcatgtaaattatatactccttattaaaataaatggaaaataagtgaatttattttattttttgagaccgagtttcgctcttgttgccaagtctggagtgcaatggcgtgatctcagctcactgcaacctgtctcctgggttcaagcgattctcctgtctcaccttccctagtagctgggattacagacgtgtgccaccatgcccggctaatttttgtatttttagtaatttaggctggtctcaaactcctgacctcaggtgatcaatcttccttggtctctcaaagtgctgggattacaggtgtgagctgccactcccagcataagtaaatttttaaaagtcaaaaatattagggccttaaaacataaatatattaatatattttatataatatttgatttttattaagactgattccaactcacattctggtaacaaatgtctcaaactttaatgtgtatatgaatttctaaatagtttaaaattcagattctgattcaggagggagggggccagagagtttgcatttctcacgggtttccagatgatgtccctggtgcaggtcagggaccacactctaagtagtaaggcacaggacaccagtggtcttacttgatgtataaagctgaggccaagaggataattcatttagatagagcaggcccttcatgtacattgccttggcctctgtgagttaaaggaccagtcttagtcacagtggccccttgccctcctcagagctgaaagctgacgagccgtcattccacagggtctcctttttggcttctagtgggagcatggagccaggcctggaatttaatctggcttgaggtgtaaaaaaacaaaaaaaaacaaaacaaaacaaaaaacttttttgaacagaaaccctttcctgagagcagaagtttcaggaggaccatggagccacaaaggcccacttatccacccgttcacccatccatccacctacctatccatcaattcatctatccattcatcatttatctatccatacatgaatagcaaccactcttcaaatgtacatggaaattcctcagtcagaaaagaagtcaacactgacttcttgtcattttgccaacattccaatgactttgagcagtaccacctaataacttctgagagctgatgttgtttgtgcaccagtaggggagtttcatttatggagtagtctccctgcaagagtgagaagtggctgtggccagaagtcagttggagaatggcaaatgtctggaatttatattaaacaacttcatggcattttctcagagaattggcactagcacttttcgcatgctaaaaagatactacatgcatgtcttaacaaacagctgcttcacttaccaatgccctcaggtataaaacatcacaaacacatgtcaacaccttcagacacttggcttggggattttcaaagtgaagcaaccacacatatattgagagtctaagttgttaacatttactgagcacttactatgtgccataaactattcttagtgcatttcatacattatctcaactcaccctaacaacaactctatgaggcaaaaatcrttattagtcccacttcacagatgagaaatctgaggcccaaagagtttggttaacttgtccaaggacacatattagtcagtggcaaggagggatataaatcccagcagcttkccccctgcatcttcccttctgaccactgtgctagggtctactctatgcctgacatcgcatatattaatacttacaaagccccagggcccccagtttagagaacttggagaaggatggcagcatgatcaccaggtgtgttgccacccaacttcttcatagaggagacgacaaagtcatttgcctgatatccttaaactgtcacacactaagtaagccttcaggcactacttactgagctggaaggttctttcttaactagatcttgcctttgcttatgtaacaatggggaaggctgtggagggggcagatgtggtagggaaatttaggagttcagttttggaaatcctgagcttgagatgcctaatggacatccaagggaaagtgtcaaagagcagatcaaaattcacatatttatttaaatacttatggatataacatatgatgaataggacttccttaaaagtaacatgtgagaacaggtggaagtatagaaaaacaagattggtcatgggtgataactgttaaactggttgggttgattagtctacagaaaaattatactactctgactacttttatatgtggctgaaacttcctataattaaatgtttaaaagttcaggacaaacaatatttcttatgtaggctaccaccaaaagtgtataacctgaagctcataatgaggaaacaacagacaaacccacagtaagagatatcttacaaaacaactggcctgcactcttcaaaaatgtcagtgtcatgaaagatgaagaatgactaaggaaccattctagagtaaatacaccaaagagacatagcaactgagtgtaatgtgtgatcctggcttgtatcctgaatcagaaaaacaattgctataatgggtattattgggataatcaatgaaatctgaatatggatttgtatgttaaataatagtatgtactgatgtgaaatttcctgaattcaatcatcatactatggttatattaagagaatgttcttgtttttagaagctactcatttaaatatttagggttgaagaatcatgaagcatggaatctattctcaaacggatcagtaataataataatttataagtgtatatgtatatatattatatagatagatataaagaaaaattacaaaaatgtgacaaagtgttaacaactggcaaatccagatgaagtctatactggtaaatacagaagtgaacatcttgttcagtcacggccccttcccagagtggcccacatgcaatgtctgattgacttggggttacaaaggccctcttgtcccaactcagcacagttctgcagggccatctagccccagaactcccaatggggttggcagaggcctctaatgacccatgtcacagcttgacttctccctgaccagtctgcttccttcctcctcctttctacaggtgttggtctccagaagattccctcacaaacctcctcctacacattaatctccatctctsagtatgcttcctgggaatccagctgtggcaattaatatgaccattttatagataaagaaactgaatcttagaaaatcacttgtcaaaggttagacagccatttattagtgaagccaagactcagacaccaaatctgctgacctccagcttctcctcctttttctttacctctccaaattacatccctctgtgaaggccaaggtgaaggctaagtccctgcttctcccagaggtctcccaacttcccctttctgatcttagagctctcatcatctatttggctcatggccatgctcctatttggggacttttcttaattatcacctcatattacataaccactatgttgtcatttaacgttttgcatttgaagttttgtgttttctctacattataatctctatggagacaaatgtcattaactattcttcttggcatcccaatagttgccatccatatgctgagcatgcagtatatcacagtgcagagaaagaacagcaagatttcctctctctggctggcttctaagtctttgaaactgagaaaacacaacatgctcaaaagacatgcagatttgcagccttgatttccttttgccttttctggaatggcataaggattcacaatataaaatataaaaggatggcaggttattccactagaggagcaataccatccatgggggagtaacccaaactgcagtagcccacatgaaaaaggtgagccagaaagtacttggtcaattacagccaagcaataaggagaaaaaaaacaacacactaggaataaaatcattagaatgcatcttggccaattaatttagcaaaatattttcattttaattatttaaaacatttcataatatgctaggaaatggggtattgtgtactttgcaaaagtaatgaagtcttagatcaaaaatctgacaccacattgttaacttttacgggtaaaataagcaaaccacttttcttctctttaaagactatcaactgggaaattagcaacaccttctatattatctcctccaagcaaggagaggtggaggtagtttccctctacagagggaaaaattaatccatactccctcactttcaatttctgggaatcagttcttgccatggtaattatgttattataagaccactctcaaaagaagacatttatgcagccaaaaaaacacatgaaaaaatgctcatcatcactggccatcagagaaatgcaaatcaaaaccacaatgagataccatctcacaccagttagaatggcaatcattaaaaagtcaggaaacggccgggcgcggtggctcacgcctgtaatcccagcactttgggaggccgaggcgggtggatcacgaggtcaggagatcgagaccatcctggctaacaaggtgaaaccccgtctctactaaaaatacaaaaaattagccaggcgcggtggcaggcgcctgtagtcccagctactcgggaggctgaggcaggagaatggcgtgaacccgggaagcagagcttgcagtgagccgagattgcgccactgcagtccgcagtccggcctgggcgacagagcgagactccgtctcaaaaaaaaaaaaaaaaaaaaaaaaaaaaaaaagtcaggaaacaacaggtgctggagaggatgtggagaaataggaacacttttacactgttggtgggactgtaaactagttcaaccattgtggaagtcagtgtagcgattcctcagggatctagaactaggaataccatttgacccagccatcccactactgggtatatacccaaaggactataaatcatgctgctataaagacacatgcacacgtatgtttattgtggcactactcacaatagcaaagacttggaaccaacccaaatgtccaacaatgatagactggattaagaaaatgtggcacatatacaccatggaatactatgcagccataaaaaatgatgagttcatgtcctttgtagggacatggatgaaactggaaatcatcattctcagtaaactatcgcaagaacaaaaaaccaaacaccgcatattctcactcataggtgggaattgaacaatgagatcacatggacacaggaaggggaatatcacactctggggactgttgtggggtggggggaggggggagggatagcattgggagatatacctaatgctagacgatgagttagtgggtgcagcgcaccagcatggcacatgtatacatatgtaactaacctgcacaatgtgcacatgtaccctaaaacttaaagtataataataataaaaaaaaaagaccactctggtacaggtagggctagaaaacaataagtatataaacatagtaacagctttaggcttggaaataattttcagcatttttttctcctttgctttcaaacattagcatggatgagaatgtgctgtgctgcaagaatactataagtgcaaatcaactgaaaaataattcttgccaaacttccctaattattcgaccagcaccaatacagaaagtgaattttagagagaagtttctaagttggaacagcttagtcccaggtattttgtcacggcagcacaaatggactaagacagtatcacatgactgggtcacacacttggtcaatatgctttaacactgcaccttcctagggggcaggcaacatgctacttactccctcatgcgtttcatcttggtcctggccatcrcactgttgaaaattggtggtcctggggacatgtcttcagccatggtggtgatggtctttgtgtctgaaaatcaatgcacagcccttattgacttcatcagcaatcctgcaacttcaaggcgatgttcaagggcaatcagaaaacagaagctaatccacctttgccacatggtaatgctacattaattagagatgaattcaattataacacgcacattaagaagatttattccaaatgacaagattatttacagttttaatatgcacaaggyattccaggagaaagcctctctcacaaaggattgtttaaacaaaacaccattatttaaaagatgagctttttatcctagaaaactcagggggaaatgtatctatagaaaagcaagtgttcctgaggaccctttggccattctctttcagcaggtgtggatgtttgactaagtgactaggaatttttctaataagcttagttttccttttatcttaatcttatacctgagcattagctttttttgcaatggaaagcaaaatgctgaccagaggtcctatctgcagctttaaacttcagcagaatggagcagaaggccaaagttgtgttcagagggtaagagttggtaatgaaagttgaggtgtaatgaaatctgctgagagagctacagtttttaatgaaacatcctgaaggctcttataaaacatgttgaaactgagggaaagaaatattccatcaactgaaacaacactactttccattaaaaagctaaaactgggttgggtgcagtggctcatgcctgtaatcccggcattttggaaggctgaggtgggcggatcacctgaggtcacgagtttgggaccagcctggccaacatggtgaaacctcgtctctactaaaaatataaaaattagctgggtgtggtggcacttgcctgtaatcccagctactctggaggctgagacaggagaatcacttgaacttgggaggcggaggttgcaatgagctcagatcgcaccacggcactccagcctgggtgaaagaacaaggctctgtctcaaaaaaaaaaaaaaaaaaaaaaaaaaaaaagaagctaaaactggcccattagcaagagctcagggcaatccatagagctgaatttacaatttggccctatgctgctctttcctccctggaactgggagcagagtactccctgtgcacgtccttagatctcttataaggtgcttcacatcccatcagtaaaaaactgtccactccaatgatcatttataaattatatccatgtagttgctatgtcagagagaagagactcatgttatgaaattcccattcttttctcaacatatctcatataacatgtgcctgcttgacttagggaccaagtaaagaagcaaggtggagtccccattttacatattagtaaaactttttcttcttcttttttttgagacggagtttcgctcttgttgcccaggctggaatgcaatggcgtgatctcggctcaccgcaacctctgcctcccgggttcaagtgattcttctgcctcagtctcctgagtagctgggattacaggcgtgcgccaccatgcctggctaattttgtatttttagtagagacaggttatctcctgttggtctcctgttggtcaggctggtcttaaactcccgagctcaggtgatccgcccacctcggcctcccaaactgctggaattacaggcgtgagccaccacacccgacctttttatttttttgagatggagttttgctcttgttgcccaggctggagtgcaatagtgagatctcggctcactgcatcctccacctcctgggttcaagcaattctcctgcctcagcctcccaagtagctgggattacaggctcccgccaccaagcccagctaatttttttctttttagtagatacagggttttgccatgttggtcaggctagtctcgaactcctgacctgaggtgatccgcctgcctcggcctgccaaagtgctgggattacaggcgtgagccaccccgactggctctattttttaaattttaaaagttaaatgcaaattctaatatgtctcacatacatcctccttttgcactacctgttggggcatgtatcccactttgaacttcttgctcctatagatataattgagatgaatattctccagcttaattctgtgccaaagtctctgatctttccttggactagatccctagttatggaaatactggattaacagggacaaaccttgtaaagggcataatacaaattaacaatgtgttgctcatagtacattcaccagttatgccttcatgataaagacacaagtaccagcaactgattgctcccatttctctcactcctggagattgccccttccacacctggagagaaaatttgcctcggccctcactgcaactggacagcagctttctgtcagctccaaccttcccactaactctggccaggacagatacttttccccaggaagcttggggagtgggcaagaggaaggcataggggtttatttcatattcctgttggttgctttttacaataatctttcctagaacctaaaaagttactaaaacaacaccaaccataccatgctaagtaactcacatgcaagctcaaaaatcagttccgccaagaataaaaataaggtgctcctttcccatcttttccagagctggcaagttttgaagacttatgcaaataaaggtcaaagcaatttccaggagagctgcagtttattttaagctggctacagtttccctcaataaggcactcagtctgctaggaaagatgctaagccttaagcccaagggtagaaaacagggcaagtataatttcgagtaacagggttggcaaagcttggtgctcagagcaattcctttttcagtgtttcttattggccaactttctttccctctgcctcccatcttccaacatgaatagtagttgctttatgtcaaagaaaaggacaattcatttaacaatcataataaaaataattggggcaagaacatagatgtcatccaataggtgactgaatcccagagtgtgttttagaccactgcttctcaaactttaatgtcatacaaatcatccagggatcttgttaaaatgcagattcttctttagtaggtttgggtagggcttgggattctacgtttccatatgttcccaggtgataccaatgctgctggtcctgcaaccacactttgagtagtaaggctctagacaggccagctacataatttgtggggcccagtgctaaatgacaacgcagaaatccttgttcaagaaacaagagaaaagctgttttttggggggtctgtatttgtctgtggacctgtcattgtgctttttgttgggtatttaatgtcattctccctcaggaactagggcagatactctgcaggggagtgtagacacttatagggacctggcagtcttacctcacggcaacccttcctcactattacctaggatcccattgggaatggaagattgcagtagttatgggatggggattaagggctaggtggcagaggaaccttcccaggtagatgtcttaaaggcaagacagcacatgagcaaggctttaagccttgagcctgtgttccactgtgttatcagctttcactcataaaacacaaattcaaagataaaattttatgaaaccccatgtgtgggctccttcctgaacctagggctctgtgtaactgcactggtctcacgtccatgaagccctggttctagagctctgctttcttaaagctctgctttctgaaaaatagctgaatccttaatccccatgttaattttcaaaaactacttttggatggaatgggcaagatggccgaataggaacagctccagtcagcagctgccagtgagatcaacacagaaggcgggtgatttctccatttccaactgaggtaccaagctcatctcattgggactggttagacaatgggtgcagcccacagagggtgagctgaagcagggtggggcgtcgcctagccaagggaagccatgagggactgtgccatgaggaatggtgcactctggcccagatactatgcttttcccatggtctttgcaacccacagaccaggagattccctcgggtgcctatgccaccagggccctgggtttcaagcacaaaactgggtggccatttgagcagacactgagctagctgcaggagttgtttttcatactccagtggcacctggaatgccagcgagacaaaatcgttcacttccctggaaagggggctgaagccagggagccaagtggtctagctcagcggatcccacccccacagagcccagaaagctaagatccaccagcttgaaatttgcactgccagcacagcagtctgaagtcaacctgggatgctcaagcttggtggggggaggggcatctgccattactgaggcttgagtaggtggttttcccctcatagtgtaaacaaagctgctgggaagtttgaactgggcagagcccaccgcagcttggcaaagcctctgtagtcagactgtctctctagattcctcctctctgggcagggcatcaccgaaaaaaaggcagcagccccagtcaggggattaaagataaaaccccaatctccctgggacagagccaatgggggaaggggaggctgtggcacagcttcagcagacttaaacgtccctgcctgctggctctgaagagagcagtggatctcctaacacagtgttcgagctctgctaagggacagactgcctccttaagtgggtccctgacccccatgcctcctgactgggagacacctcccagcaggggttgacagacaaatacaggagagtttgggctggcatctggtgggtgcccttctgggatgaagcttccagaggaaggaacaggcagcaattgctgctgttctgcagcctccactggtggtactcaggcaaacagggtctggagtggacctccagcaaactccagcagacctgcagcagaggggtctggctgttagaaggaaaactaacaaacagaaaggaatagcatcaacatcaacaaaaaggacatccactcagaaaccccatctgaaggtcaccatcaaagaccaaaggtagataaatccatgaagatgaggaaaaaccagcacaaaaagactgaaaatttcaaaaatcagaatgcctcttcccctccaaaggatcacaactcctcaccagcaagggaacaaaattggagggagaatgagcttgacaaattgacagaagtaggcttcagaaggtgggtaataacaaactcctctgagctaaaaaagcatgttctaacccaatgcaaggaagctaagaatgttgataaaaggttagacgaattgctaactagaataaccagtttagagaagaacataaatgacctgatggagttgaaaaacacagcaygagaactttgtgaaacatacacaagtatcaatagctgaactgatcaagtggaagaaaggatatcagagactatgaacttaatgaaataaagcatgaagacaagattagagaaaaaagaatgaaaaggaatgaataaagcctccaagaaatatgggactatgtgaagaaaccaaacctatgtttgattggtgtacctgaaagtgatgaggagtatggaaccaagttggaaaacacatttcaggatattatccaggagaacttccccaacctagcaagagaggccaactttcaaattcaggaaatacagagaacaccacaaagatactcctcgagaagagcaaccccgagacacgcaatcgtcagattcaccaaggttgaaatgaaggaaaaaaggttaagggcagccagagagaaaggtcaggttacccacaaagggaagcccatcagactaacagtggatctctcagcagaaaccctacaagccagaagagagagaaaggtcaggttacccacaaagggaagcccatcagactaacagtggctctctcagcagaaaccctacaagccagaagagagtgggggccaatattcaacattcttaaataaaagaattttcaacccagaatgtcatatccagctaaactaagcttcataagcgagggagaaataaaatcctttacagacaaacaaatgttgagcgattttatcgccacctggcctgccttacargagctcctgaaggaagcactaaacatggaaaggaacgaccagtaccagccactgcaaaaacatgctaaattgtaaagaccatttaaactatgaagaaactgcatcaactaatgagcaaaataaagagctagcatcataatgacaggatcaaattcacacataacaatattaatcttaaatgtcaatgggctaaatgccccaattaaaagacatggactagcaaattggatagagagtcaagactcatcagtatgctgtattcaggagacccatctcacatgcagagacacacataggctcaaaataaagggatggaataatatttaccaagcaaatggaaagcaaaaaaaagcaggtgttgcaatttagtctctgataaaacagactttaaaccaacaaagattaaaagagacaaagaaggacatggcataatggtaaagggatcaatgcaacaagaacagctaactatcctaaatgtataagcacccaatacaggagcacctagattcataaagcaagccctcagagacctacaaagagacttagactcacacacaataatagtgagagactttattagacagatcaatgagacagaaaattaacaaggatattcaggacttgaactcagatctggaccaggcagacctaatagacatctacagaactctccacccgaaatcaacagaatatacattcttctcagcaccacatcgcacttattctaaaattgaccacataattggaagtaaaaacactcctttagcaaatgcaaaagaatggaaatcataacaaacagtttctcagaccacagtgcaatcaattagaactgaggattaagaaactcactcaaaccacacaactacatggaaactgaacaagctgctcctgaatgactactgggtaaataacgaaataggcggaaataaataagttctttgaaactgatgagaacaaagacacaacgtaccagaatccctgggacacagctaaagcagtgtttagagggaaatttatagcatgaaatgcccacaagcaaaagcaggaaaaatctcaaattgacaccctaacatcacaattaaagaactagagaagaaagagcaaacaaattcaaaagctagcagaaggcaagaaataactaagatcagagcaaaactgaaggagttagagacaggaaaaacccttcaaaaaatcaatgaatccaggagttggtttactgacaacaaaatagatatacygctagccagactaataaagaagaaaagagagaagaatcaaatagacacaataaaaaatgataaaggggatatcaccactgattccacagaaatacaaactaccatcagagaatattataaacacctctatgcaaataaactagaaaatctagaagaaatggataaattcctggacacatacaccctcccaagtctaaatcaggaagaagttaaatccctgaatagaccaagaacacattctgaaattggggcagtaattaacagcctaccaaccaaaaaaagtccaggaccagatggattcacagccgaattctaccagaggtacaaagaagagctggtaccattccttctgaaagtattccaaacgatagaaaaagagggattcctccctgactttttatgaggccagcatcatcctgataccaaaacctggtagagacacaacaaaaaaaagaaaatttcaggccaatatccctgataaacatcgatgcgaaaatcctcaataaaatactggcaaactgaatccagcagcacatcaaaaagcttatccactacaatcaagtcagcttcattcctgtgatgcaaggctggttaaacttaggcaaatcaataaaagtaatccattacttaaacagaacaaatgacaaaaaccacatgattatctcaatagacacagaaaaggccttcgacaaaattcaacaccccttcatgctaaaaactctcgataaactaagttttgatggaacatatctcaaaataataaaagctatttatgacaaacccacagccagtatcatactgaatgggcaaaagctggaagcattccctttgaaaactggcacaagacaagaatgacctctctcatcactcctattcaacatagtattggaagtactggccagggcaatcaggcaagagaaagaaatacagggtattcaaataggaaaagaggaagtcaaattgtctctgtttgcagatcacatgagtctatatttagaaaaccccctcgtctcagcccaaaaactacttcagctgataagcaacttcagcaaagtctcaggatacaaaatcaatgtgcaaaaatcacaagcattcctatataccaataacagacaaacagagaaccaaatcatgagtgaactcccattcacaatggcttcaaagagaataaaatacctaggaatccaactttcaagggatgtgaaggacctcttcaaggagaactacaaaccactgttcaatgaaataaaagaggacacaaacaaatggaaaatcattccatgctcatggataggaagaatcaatattgtgaaaatggccatactgcccaaggtaatttatagattcaatgccatccccatcaagctaccaatgactttcttcacagaattggaaaaaaactactttaaagttcatrtggaaccaaaaaagagcccacattgccaagacaatcctaagccaaaagaacaaagctggaggtatcacgctacctgacttcaaactatactacaaggctacagtaaccaaaacagcatggtactggtcccaaaacagaggtatagatcaatggaacagaacagagccctcagaaataataccacacatctacaaccatctgatctttgacaaacctgacaaaaacaagaaatggggaaaggattccctatttaataaatggtgctgggaaaactggctagccatatgcagaaagatgaaactggatcccttccttacaccttatacaaaaattaattcaagatgggttaaagacttaaatgttagacctaaaaccataaaaatcctagaagaaaacctaggcaataccattcaggacatgggcatgggcaaggacttcatgactaaaacaccaaaagcaatggcaacaaagccaaaattgacaaatgggatctaattaaactaaagagcttctgcacagcaaaagaaactaccatcagagtgaacaggcaacctacagaatgggagaaaatttttacaatctactcatctgacaaagggctaatatctagaatctacaaagaacttaaacaaatttacaagaaaaaatcaaacaaccccatcaaaaagtgggcaaagtatatgaacagacacttctcaaaagaagacatttatgcagccaacagacacatgaaaaaatgctcatcaacactggccatcagagaaatgcaaatcaaaaccacaatgagataccatctcacagcagttagaatggcgatcattaaaaagtcaggaaacaacaggtgctggagaggatgtggagaaatagggacttttacactgttggtgggactgtaaactagttcaaccattgtggatgacagtgtggtgattcctcaaggatctagaactagaaataccatttgacccagtgaccccattactaggtatacacccaaaggattataaatcatgctgttataaagacacatgcacatgtatgtttattgtggcactattcacaataacaaagacttggaaccaacccaaatgtccatcaatgttaggctggattaagaaaatgtggccaactattgcaaggacagaaaatcaaacaaaaagagcccacattgccaagacaatcctaagccaaaagaacaaagctggaggcatcacactacctgacttcaaactatactacaaggctacggtaaccaaaacagcatggtacttgtaccaaaacagatatatagaccaatggaacagaacagagccctcagaaataataccacacatctacaaccatctgatctttgacaaacctgacaaaaacaagaaatggggaaaggatttcctatttaataaatggtgctgggaaaaccagtgagaactgcatgttctcactcattggtaagaattgaacaatgagaacacttggacacagggtggagaacatcacacaccagggcctgtcgtggggtgggtggaggagggagggatagcattaggagatacacctaatgtaaatgacgagttaatgggtgcacacaccaacatggcacatgtatacatacgtaacaaacctgcacattgtgtacatataccctagaacttaaagtataatttaaaaaaatgtggcacatatatgccatggaatactatggagccataaaaacggatgagttcatttcctctgcagggagacggatgaaactagaaaccatcattctcagcaaactaacacaagaacagaaaaccaaacattgcatgttctcactcataagtgagagttgaacaatgagaacacatggacttagggagggggacatcacacaccagggcctgtcgggggttgggggacaagtagagggatagcattaggagaaatacctaatgtagatgacgggctgatgggtgcagcaaaccaccatggcatgtgtatacctatgtaacaaacttgcacctcctgcacatgtatcccagatcttaaagtataatacaaaaccctaattttgcctttattaaaatactagtaagtcaaatccagtaacatgaagaaaggatagtatatctttcctcctgacaagaatgtcttctcttgccatttttatataacattgtactacaggttatagccagggaaattgggcaagaaaaagaagtcaaaggaatccaaattggaaaggaaaaagtaaaattatctcaatttgcggataacatgattttgtatatagaaaatctatgtcctatagaatatgataggcatattcaggttttctatttctttttgttaaaaaaattatttgtgtatttatgtttagagacagactcttgctatgttgcccaggctgactttgaactcctaggctcaagtgattctcccacctcagcctcccaatagctgggactacaggtgcacatccctgtattcagctttctattgcttctgagtcagtttcagtgatttttgtctttctagaaatttgtccatttcatctaatttatctgatttgttggtatactgttgttcgtagtatacctttacaatcctttttatttctttaaggttagtagtaatgtcccctctttcatttctgatgtattaatttgaatcttctcttttattttgttggtcaatatttgttgatctttacaaagaacctatttttttttgtttcactgacatcctttattgtttttccattctttattttgcttatttccactctgatttttgtaattttctcccttcaatttgctttggctttaatttgctcatctttttccagttttttaagccatatattttatatgctyaataggtgggagttaaatcaaaagcaatataaatagtagctgtgattcttaacctataaaaatcttgcagtcaattaagaagataggctatctatacagatgatccctagtagtactatggagtacatatacataagacactatactatgtatggggcatgcaaagaggtataatgaggtccgtggaaaaagcaataaccttcaagttaggggaccacagttattcttttagttctctcaccagctcaggccacctccctgggtctcacttccctcattttatatttcagtagtttcattagactgaaggccttccctcaattctaacattctgtgatctaagacataggtcaggcatagcatttacttgggaagacaatgcctatgctaacaaagataaagagcaatcaaaggaaacaaatgctaagaagcaaatggctgggaccaacagtaaatgttatgagcattatgtcaggcaaaatcatcctgaagtctctcttctcatctgtgaaatatagaatgatgaggattatgacacttgacaatatcccatggggatgttttgacaatgagatgaaaacaaaatgatacgaagacacatttggcaattggatgctgtgtttcctaaaagtgcaaagcacagctcataatagtaatattgtcaggattcctcctacttctatggtctctcaccagcaaagttattttccctgaaggagtgacagcttgataattctgacatttcaccagcagagagtttcttctctcatttctttgaaaaatttcttctaaaatttccctttacccatttcagttgctggacaaatgaccttgatcataaaagaaaaagctgtgtttgccctccctgctaaacaccctgccatgtgggtaataaagagctgatgcagggaccacagaggtggatattttggcaaacaagatctcacttaagcacctgagacattgcttactcaggaatcctcacagacactgcccttggtgcactgtacatttagaatgcttcttacctaatctttaaccctcgtcttgctctgaatttcctaaggaatacttaggaaatagcagttacttgactgataccactctttgccaaattattgcaaaagtatatcctcatggctcatatttctcctcctactccttggaatgcgacatgacagaagatttgcctagatcaaggtcagcaaacctttatctgtaaaggggcgggtagtaaatattctagactttatagaccatagaatttctgttgcaactcaagtctgcttcagtagcatgaaaatagctataggcaataggtaaatgaatgagcatggctgtgttccagtaacattttatttacaaaaacaggcagtgagacagatttggaatgcaggccatagtttgctgacctctggcctaaatgatagagattcatcatgattctgagctggatgtgaccctagaacacctcaagtcaaatttcttcatcttacaggtgtgaagactcaggccaagagaggttttatgacttgcacaaggtcatagaaaggggcagagcccagactagaactgtggtttcctgactcccaaatgagtgctctaacatcccatagaagtgccacaaccaaataacgagtttcatgtgataattaaaaaaaaataagatcatcagacagaacttcccctctaaaaggttgaaatttggggtgatcattatgtcttccatctcatttctccacctctccagatgacagccccatgacttattatgaggggctgtgaatcagcagggcactgtgaaagctgctctactctgctgagaggcttagctgacacaaacttggtgaagatttttccttgagcttctcctgtgacaatrgtggacatcagaatggcaacaaaactgtcgaagaatctgcaaaacagggtagtctctgyactgcctcacctcaacacctcaacaccccagaaatggagatgcactatgcagatcctccttgaaggaagaacttgctaccccagctgttgggagtagacagcctccagctgtggccccttcaggaaattcttcagcctcagaaagctgccttcccccaaatcatgcccctccaagtagcaacctttaatgactgatcatggtagaggtagagaacctaaccattatggcctttgctggcaacacccatgggactggagctctctgagggtttggctaaggcttgtcaggccttcatcactgctcaacttctccctctgcctcatcctgcatccttctccttctgtccacagggtcaatcccaagggcactcatgcataaaagtcctgcctactcaactctgtcagagacggcttcctagaaaacccagcctaaaggttgaagtggataaggttgagggcatggagattattgtcttggttcctttaataagttgggtatttgataagagcagtattagaaataatgacatgaccattcctaccacttcttgtccatccccagctctttcagagaattgattttattggtacagggcagaagccactgccaaagaagttgttgtcaaccctgtggcatcagcggtgtcaatgccaaaccacattaggatgctggagtagaaaagcacaggaggaaaaggaagaagatggtctaggagagaacaacctcaaatgctttccagtaggaagggagctggggcatattaggacaagtatgtgagctggcttagaggacttgggtttgaatcttgattctgtgatgtttggaaaggtaaaaatctgtgactcagttgcctcattgayacaaaaaaaagaatcctatcttctatggctctagtaaagcttaaatgtatattaaacttatatataaaggtrcattattgctacaaaagacccaaggcaaatttacactacctccccatgatgtccaccacaatgctttgcatggagcagcttctcagtgtatcaataggactccactgcctacaccaaaattaaatagttgggaaaaagtggatcaacttgggaaaagcaaacttgctacttataggaaatatgataaataccagaagatagaaaataaaatatttttattatggttatttcacactgcaaatattcacctgaattttatagatgattaaaaacaacaagagttaaggagtttggaaattcttgtttccttttgaatacaccaggaaaaacctctaagaacagtagctaccagtaaaaggaagagacgaagtgtctgttttttggattgacattcagtaattaaatgtggatacaggctaagatgagatttgtggaagccagaccctaactttttcatttgtgctttccctgtggagacactagccaatgtttggggagtttaattattcttatctgccaacatgaagaaatttagctttaaaaacaaaacctgcttttctgtaataggaggttgatctggcttcaagactgattcaaatacttaaggaaagtgtatcagcagtacttccttctctttttttaagtttttaaaatttttgtyttattttatttcaatagtttttggggaacaggtggtttttggctatatggataagttctttagtgatgrtttctgagatttgggtgcacccatcactagagcagtgtgtactgtgccccatgtgtagtcttttattcctcaccccctcccacccttccccctgagtccccagagtccattatatcattctgcctttgtgtccccacagcttagctcccacttataagtgagaacatatgatgtttggttttccattcctgagttacttcacttagaataatggcccctctaactctatccaggttgctgtgcatgccattattttgttcttttttatggatgagtagtgttccatggtgtatatatatatataccacattttctttactcattggttgatgaacatttatgctggttccatatttttgcaatcgctgctataaacatgcatgtgtaagtatcttttttcatataatgacttcttttcctttgggtagatacccagtagtgagattgctggattgaatggtagttctacatttagttctttaaggaatctccatactgttttccatagtggttgtactagtttacattaccaccaggatgcgttctcacttttcattagaatgtgaatcctgacaattgcgggggaagcatgtarctctcwctatcgtcagcagaacagaagataaattgaaaaatgattacctggtatcatgtactccttwgcttctatgaaagccaaaagaggagatgtttccacaagacaccgcaagggccatctctcctttcacatctctagttattcctaaaattctatccttacaacagtggagctcattaatatagtaaatatttgttatttttggccttacattctcatttyycttgtaaggggaatcttttactttgtgagacagagcctggctcccattaaagccatgaatgccgaagactaacttaccagtctcccatgtaattagggtgtagaaatatgaccagcctctgccagtaagatgaatttggctggacatggtagttcacatctgtaatcccagcactttgggaggctgagtcaggtgaaccacttgagcccaggggttcaagaccagcctgagcaacatggcaaaaccccatctctacaaaaaatacaaaaaaaaaaaaaaattagccaggcatagtggcacatgcctgtagtccctgctgcatgagaggctgaagcgggaggattaccctgagcccaggaggtcaaggctgcagtgagccatgattgtgccactgtactccagcacaggcaatagagtgagaccctgtcttaaaaaaaaattgataatgagaagaagcagagaccacatgaagtccatccaggcaggtttgcggtaggaacatcagccacatccaggttcccaaggcagcaatattggtcagtctaaaaactgtgcccagtatctaacattattatccttgaggacactcaagattctctgtggaaaggccaatttggaagggatctgaggccagctgtgtgagtcatctgggaaatgcaatctccagccccagtgaagccttcagatgactgtggccctgggtgatagctaactgcaaactcatgagagaccctgagccagaaccatccagttacgccctcctaaattcatgacctacagcaactatgagaggtaataaatgattatcattgttttcagcccatatgtttttgagtaatttgttatgcatccatagaggaccaatataggcattgagcttttatggtaggtcaggataagaaacaaatacataaaaaatatttctgcatttaccttaaaaccagttttgaaatcactatattggtgcatagtctttgtagaagacctatgttagagtaagtttttagaacttagggttaaaagattaactttgaacaaattaatttcttaaatctcttaaaaatgttttaaattttgttttcattgacacataattattgtatgtaattatgggatacaatgtggtgtttagataaatgtatacattgtataaaaatcaaatcagtgtatttagcatatccatcaccttatacattcatcatttcatcgtggtaagaacatccaaaatcttctcttctagccattttgaaatgtacaatatgatattgctaaccacggtcacccaactgtgcaatagaataccgaaatttactcctcctatctaattttaactttatactcattgaccaatctcttcttatcttcctctcttctctccttcccagcctttggagacaaatttaactgtttatttaagcaaagaatgatttatgaattggacagccctcagaaccacaagaggtttggagaactctattctgcaggcaagcagcatttatcgatagaaaatggaagtgaggtatagaaccagctttaytggttacagctgggcatttgccttatttggacatggtctaatcagttggcaacccaaggaaagctttacagagaagtagaaggtttgtaattctggtgtttgtgagggcagggcaaggttgtgttcactgaaatattctcagaggccaacacatagtatggcatacaacttttttttcaataatcacttaatgaatgaatagaaagatagaagtagagctgccaagcagtcgggaggggaagcattctctagaaaggatcaagcagtgtgaaagctcagaagtgtgaaacaactgagtatattcatggaaatatcaagaagtttggtgctactggaatgtaaggtgtgaggaagggattgatgaacctagatgtatagggccaaggccagaaaaaaatcttgtgtgccaggttaggagtttgaatctcatcctgtgggttaggataccactgttttatttttttaaagtacgatctgaaaaggtcacctttaacaaacaaggagagtgctttgaaagcagtgacttgaaatgtagaactgggtatgtgttattactactcagataacagatcacatgttactacagtaactgtttaggatcatcattgctcagtaagaaagacagaagatgacctctaacttcattttctttgaacttcttagaaatgaaaattctgtctccatatcttagtaactacattatgagccaaggtaatctacaaactttaacattcttaaatgtttgggaaattagctgttctttctctctttctttctttctttctttctttctttctttctttctttctttctttccttctttctgtctgtctgtctgtctgtctctctctctctctctctctttctttctttcttagatggagtcttgctcttctcacccagtctggagtgcagtggtgtgatcttggcttgctgcaacctccacctcttgggttaaagcgattctcctgcctcagccttctgagaagctgggattacaggcacccgccataatgcctggctaatttttgtatttttagtagagacggggtttcaccatgttggcctggctggtcttgaactcctgacctcaggtgatccacccaccttggcctcccaaagtgctgggattacagatgtgagccactgtgcccagccaaattagctgcacttctagctgagaaaagttatcagcagaattatacatgtccttggtaaactatatttataaaaaggctttgtacatccaaactggatgttgtttcagaagtaattagaatttcacagatgctccaaaacctcacttcccattaagattcttttaatgtgttaataggtctgatcagttttgctgtttgaaaattgttacccctcaattcttccatagaactttggtaataattccttaatctctgctaaacaataacactgatatagaccagagaaatcatcagggcttctgaatcccttagaaacttcccttgcttaagctcttcaaactcttaagccattaagtgtggtgatgacttaaagtcagttaatcttgcactattgtgtttttcaccttgacagaaaaaaatttctcatgctagtctcacagagatttcaacatactgttttactttggttactgacacattgcgaccactttcattggaagagagaagggatattctggattataagccacttggatcattttgatgtggatacacaatatctgttttccattatcccttctgtttatgtcttatagagatttatgtcttatgaaaaatttaaatttctacaacttctttaaaactccaaagaacgcaacagattcaggattagtgacaacttacggagaacatgctacatgtctgctaccttgccagacagctccatttgatccatgtgtagcaaggggaggtagcaaggaaaagactttgtaatataaataaatccctttaacaatattattaattactcttattagcatactcatagcaaagaacattatgtatattggtgttaactagaaagaagttccagtaatcaagtttacatagctaaaagagaaactcaccaatcattaattcacttaatacacatgcattatggtttcattgaagttaatatactttgtagcagggatattgtacattgcactggggttataccccagtacacacccaacacacatttgccttattcacagtgtatggtgtactcatcacagtattctgtaattatctgcctccctgactatactgggaaatcattaagacagggacttgttttcttcgccactctatctgtgacatttggcttataatgcaaactttataaacatttgtagggaaggaagaagaggaaaggaaatcaaggatagaaatttcaactacggaaatgtcatgtttcaaagtatctgccctcagtaaaatagctattggctatattattggctattccccatgccctcattctggactttttttctgttcccttttcatttcttccctctttctttctcctaattctgcctagaatcacttaatatcctgttcatgtctggtcttgcttcttgtatcccatgggaaattttggtgggaatttagcgttttgtaaatgaggggccttcatgtaagacaatttgttttccatgtatgaraaaagcacctagtaggtattccctggtactttcacaaaaccttgcactgatctgtccaggagcccacctcatgacaaggaycatattctaaatgagtctcaatatccaactctttatgcaatgccttgaaccttcatgagctctctaaatgcctgatgtggatgctgaggatcaggcagaaatacaataccacttctaaggaagctcagtaactcttatgcacagtgccagatagcccatcacacaggacaggatcacagaaagaaagaggaaaaaaatctaggaagaaaacatttcattttagcttatagcttttaagttctctataatttttggaaataaaatttttattttacactttagtattgttctgtttgaattataaattggggtgagtgtgcacgataatcctttcaaggcttaaagattataaagccatagttcttaaagtgcagtctggayccagagcatcagcatcatgtaggaagttgtcagaaatacaaattcttggacacataccaaacctgtattttaagccctctaggtaattcagatgcatgcccaagtgtgaaaatcactgatctcaaggctttaatctgaccttgatgctataaaggagactaatacactgaacttgaaatgcaaaaagtcatcttcaggatctcctgaagccacacaaatgctaactcattcattcagtccactcatctgtgatgtaagaaagaaaaatatcactgtccctgttccaagtagaattcaaactaaattggggtcaggaatggggtcaagccactacacacagcattttcagggtttcgaagttaaaaatttcttggttgaaattaccagaaaggacatgtgtatgtctgtttttctttcttctctggttaagagatagaagaagctcttgaagatgtttgtagaagatacatacatatcttgacatgctctgcaggcacctgggcattaccaaagtgcctaggcagataatgagcatgagtaaagcctagttcaattcacagaggtttcattttgaagtgaaaaagcttatactctgacatacttaagcttaaattgtccccggatcctgttaacattctgacatatattaacaaccacaatgattaataagctctaactattattacagttagtgggcctcccaaaaatgtaataggaacaaagcagacacaagctacctgggcaatgttagacccttataagactatgtgatgggattgtcttcatgatttctatataatgacagggaagttcttgcagtcctgaaagcaataaagttctcatgtgtaatgagggtcctgctatgagtttccacaccagacaggtatttcaaaagcatgtgctcccatcatctcaatgtctgtagccataatcaaagaactccttccatttcagcagcagcattaattaaattctactgttctggtaacataagaggtcacacacaataagaggtcatcatagtcataagaagcagtagaagggttaaggggcttcctgtgttgcacagttttgggcagcaagcactttagcagttacatggaatgaactctgaaatgtcctataaatcatcccagcagatgccaggacataagcagagtaaaggtatccaaaactgaaaaatacatttaattaacgtattcagaaccttgcaatcagataatctgaaaagaagctattataacttcagggtatatgtattttttattttataatctagcttctttttaatttacaaatttagtttactataatcttctcagaaatcaaagtgtccaaaagtcttaatccagccttaatagcaggcacactaaagtaatggagggcagaattgggctctttgctttccaacacttacctctttttaaaaattgacttctaatctaagaattcatgtacctagtacttttttaagtcaaagcttttaatgttaaaaacaagaaagcttcctgcctcaccttcaagttccagtctccaaagtcaaccatattcaactctttaacttgtttttttttttttttgtatttacctttatctctctatagcacatgtttatacaactattttttttaaacttttctgttttagacaatctgttttggacttcctactataaatagggaatgttaattttgttctttctttcctctctctgttatacacacacacacagatgcacacatacacttacaaatatttttcttccctccatctttccaatatagttacatcacatttaaaaaaaattattatgactatgcaaatattgtatacagctaagcactcagtgtgtgcagattacattttctttttaaaaaatgactttttgtttttccaggagttcataattgccctggatttttcactttgtttagttttctaataacttctaattcatccctaaactcaccaaaggaactgcaaactcctctcattatgataaaatccaaatgggttatccattagttccattcctctctaggagatatttatttaccccttggaattctctgactcattctagtctgaatggattatttcccaggcctgttgcccacctatcgttcagtgacctttctttactctcattctgggaatccccttaacctctctcctatattggatttcctatcacctgaagttcatgtcttcctctttcttgattgactcttaggtttgatgacgcatatcctctaggaacttcctaagtaaagtcatgggaggtagatatttttcagacctcatttttgatattggatgcctgcaaatgtctttcttcctttctcacacttgattgatagtttggatagataaatatttgtaggttcaaactttattatcttctagcttttagttattgttgaaaaataagacaccactcttttctctgatactttataagtggtctgtttgattctctctagatatttttcttatttatttgataatttttttcattttctgttcttttttcctggaatttctatttgttaggtgctgaatcacgtagatgaatcactttgttttcttaccatttattaattatattctggtaaatttcctcacttttatcttccaaaccttctactgaatttttatttctgccattaaaattataactttaagagctctttcttattctctgtatgatttgcttcacagaggtaatactttctctgctatcttttagaattttaatattgtttctttaattttttattttaaaaaacttttgtggatacacagtttttgaatttttattttcttgtctacattgtctgtttcctgagttctttgtatatttttgtcttgatttctctttttggttagatttcctcagatactggctactgcattgctacatgttcacatttaagtgtgaaaaattaaaagtcagtttaagctctttctgcagattcagagattgtcaactggtagcgctcattcccaccattttgttgaggaaatgttaacatccttaggattctcaggctggtaaatgctgtcagagagatatcttctaaagagtccatgcttttctgaacctgaaggagtccatgctgttcttccagtgtttcagaagccaagtaggaatggtatctgggggtttcataacttaatatgaagactttcaactcatctctttgttttcatcacatcacatcaccctgtcctttggtgtccctaaaaccttcctgattcaatgttcccccaaatcgagtctgttttcttctgtcttgactgtggagaggaatattgtggctgtgccagtggagagaaaggcacctggggtctatttctccttacgcacactgtcaaccaatcttcccattttaatcttcacctataccatgccttcagcggtagttgaggcctccaaatctygagcatttatgagattctgtaggttcagttgccttgcttctcctagcctacaccttaccttcccttctttcctatatacatcttaggcacttagctttcagctttctctgttttctaaatcagttatcactcatctatctgctttatatctttctcaagttcaytaaagctctcatctgcttccatctcctcttatgttctcttttttttctgtaggtttatattagcttttttccttttttgtcatgttagtgggacttcaagcagagataaatgtgtatttttactccatgattctaatgctcatttctttaaggaaaaaaaaaacacccagcctagaaaggaatttggatattaactattcaatcagtgctatttcaatttttagcagtggaatctatctttttccagacacaatcttttatagaaattcaatttataaaacagataagagtgaagataattttggttgaaactggtaaaagaacagggtctgcatctaatttctcctaaaaatatttttaaatatttcacatggaaaaagcaaaatagtgcacagagattcacactataatcttttattcaagaaagaacagaggaattcactggaaaaggaaagatcccagtgaagagaggatgggtagacagyctgcatgccaacaactgactgagaactgtgagtaaagccctaatatgggagagtgagagagactgtttctctgtgatccagctttccacggggggaccatgcaatccaggccatggaagagcaccttgtccctcaccagccctggtgctaacttggagaaaggctggcaggctgtaagaaagaaaggctccaggaagtgccccaagcatttttccagacccaaacctcagcttccatgatatgattattatgtattgtatgcctatttaaaaaatctcatgtactccataaacacaaacacctactatgtacccacataaattttttaagaaccatatgatcatctatatagatgcagaaaaagcatttgaaaaaagtcagcattctatcatgataaaaccttctataaatgaggcataaaagaaacctacctcaaaataataaaggccatatatgacacatctacagccaacatcatactgaatggggaaaagttgaaagcaattctcctaaacctggtacaagtcaagaatgcccactttcattactcctgttccacacagtactaggagtcctacccagagcaaccaagcaagagaaaaataaatagcacccaaattggaaaaaagaaagtcaaattatctcagtttgctgatcatatgatcttatacctagaaaacactagacttctccaaaaactgttagattagatgaacaaattaagtaaaatttcaggatacaaaataaacataccaaaatctatggcatttctgtacaccaataacaatcacattaagaaccaaatcaagaaggcaattccatttacaatagctacaaaaaaaaaaaaaccctaggaatacatttaaccaaataagtgaaaaatttctacaaggaaaactacaaaacactaatgaaagaaatcatagatgatgcaaacaaatggaaacacatcccacgctcatggatggagagaatcaacattgtgaaaatgacttcaatgcaattcccatcaaataccaccatcattcttcacagaactataaaaagaaactctaaaattcatatgaaaccaaaaaagagcctgcatacccaaagcaagactaagaaaaaagaataaatctggaggcatcacattacctgacttcaaactatactatattataaggccatagtcatcaaaacaacatggtactggtataaaaacaggcacaaaaaccaatgggtcagaatagagaatccagaaataaagccatatacttatagctaactgatattcaacaaagcaaacaaaaacataaagtaggaaatggacaccctattcaacaaatcgtgctgggataattggcaagtcacatgtagaagaatgaaactggatcctcatctctcaccttatacaaaaatcaactgaagatggatcaaagacttaaatgtaagaccgaaaccataaagattctagaagataacatcagaaaaaacccgtgtagacactggcttagccaaatacttcattaccaagaacctgaaagcaaatgcatcaaaaacaaagataaatagatgggacttaattaaactaaaaagcttctgcacagcaaaagaaataaacagcagaattaacagacaacccacagagtggaagaaaacctttacaatctatacatccaacaaagcactaatattcagaatctacaaagaactcaaacaagtcagcaagaagaaaacaaaaaaaaatcccatcaaaaagtgggctaaggacataagtagacaattctcaaaagaagatatacaaatggccaacaagcatatgaaaaaatgctcaacatcactaagtatcagggaaatgcaaataaaaaccataatgtgataccacctcactcctgcaaaaatggccataattttaaaaatcagaaaataatagatattgacatggatgcagtgaaaagggaacacttttactctgttgatgggaatgtaaattagtacaaccactatggaaaacagtatgaaaattatttaaaggactaaaagtagatcttccatttgagccagcaatcccattactaggtatctacctagaggaaaagaagtaattatatgaaaaagatgcacatgcatgtttatagcagcacaatttgcaattgcaaaaatatggarccagcccaaatgtccatcgatcaatgagtggataaagaaaatgtgatacacatacacatgtggtacacacaccacggaatactattcagccataaaaaggaatgaaataatggcatttgcagcaacctggatggaaatggagactgttattgtaagtgaagtagttcaggaatggaaaaccaaacatcctatattctcactcatgtgagagctaagctatgaggacacaaaggcataagaatgatacatttggactttagggacttgtggggaaagggtgagggaggtgagggataaaaggctacacgctgggtacagtgttcactgctagggtgatgggtgcaccaaaatctcataaattgccattaaagaacttattcatgtggccaaacaccaactgttccccaaaaacctattggaataaaaaaaatttttttgtttaaagaaaacctagggaaaactcttctggacattggtctatgcaaagaattcatgactaagactacaagagcataagcaacaaaaccaaaaatagacaaatgggacttaattaaactaaaatgtttctgtgtagcaaaagaaacaaatcaacagcataaacaaacaatctgcagaacaggagaaaatatttgcaaactatcaatctggcagggactaatatccagaatttatgagggactcaaacaaccatcaccaaaaacaaacaaacaaacaaaaaaacaaaaaacaaaaaaaccccaactaactcgaataaaaagtgggcaaaagacatgcatgaacagacatttttcaaaagaagaagacataaatgggcaaaagacatatgaaaaaatgttcaacatcactaatcatcagataaatgcaaattaaaaccacaagaaggtatcttacaccagtcagaatggctattactaaaaagacaaaaaataacagatgttgatgaggatacagagaaaaaggaacatttatacagtattttggtaggaatataaatttgtacaacctgtatgaaaaatagtatggagattgctcaaagaactaccattcaatctagcaatcccactactgggtatatacccaaaggaaaagatcattatatcattatatcaaaaagatacctgcacttttatgtttattgcagcactattcacaacagcaaagatatggaaccaacctaagtgtccgtcaaaggacgattggataacagtmcacacacacacacacacacacacacaatggaatactattcaaccacaaaaaaagaataaaatcatgaattttgcagcaacatagaaagaactggaggccattatcttaagtgaaacaactcagaaacagaatgtcaaataccaatgttctcacttataagtgggagctaaataatgtgtacatatggatatacagtgtggagtaacggacgttggagactcagaagagtgggaagttgggagagaggtgagtgataaaaaaattacttaatgggtataatgtaccatattcaggtgatgattacaccaaaagcccagactttaccactgtgcaatatatctgtgtaagaaaactgcactgtacccctttactttatagaaattataacaataatatatatttttgagatagggtctcactctagcacccaggctgaagtacagtggtataatcacaactcaccgcagcctaaatctcttgggctcaaggaatctcctagtttcagcatcccatggagttaggactccaggcacaggctatcatgcctggctgaattttaaaaaatttkgttagagacggggtcttgctatgttgcccagactggtctcaaactcctgacctcgagtgatcctcccacctcagcctcccaaaacgttgggattacaggtgtgagccaccaccttcgaccacaaatattttaaaatatttttaaagagcctctgctgcaccagacacagtgttagactctggaaaaatagagatgagcagtacagacacagcttctgttctcatgctgcttagtaccaccaacccctcatcctggaggtctctaaggagcctagattgaaaattagtcatctaatctaaggtccagagaggaaaaagccttcctggtcttaagtcatgcttcgatgttaaatgtacttgttaaatgttaaatgcatcaaataagtgtatttgatatacaattaaacagatcacagggtgatggtcaggtgagaaaatcaaagacttatgttatgactgaggtttcccatatggagatgtggaataagctagaaaaaggctataaattgtgcataaagctcctaataaaagagtgaatgtttgcccacctgaaaacttaattgtttgtttttaccctgccattccctttgaagagattgcttttggtttagagtttaaattttttaaataaaaacttgtaatcaaatttagaagaaaaaaatatctcagcccttttcatctagtaagaatactctgtgtcactgtttatcatctagtgctagagtgtatctcagttaggcttctcagattaaaaaaaaaatagaagaaactaagaaatagggctttatccctgaagcatagcaatcctatttattgagactgacaatgctaaacaagttttagttttgtttttcagaccaaatctcttcaaataactgactgaccttcggagtgatggtcctcccagcttaactgaatgtactgtgctctctgcttctaaaagacaagttaggtagggaggttcctttttccagaaactgcacaaacttgttattatgcactgctaggctgccatttgatcacaagggaccactgaatttcaattatttcatccttggagactaagagttacttacaataataataagcaatttttctttgagtttcctggcytttgggtcagacattcaacttctattggcctcagtttcttcatctgttatactaagatatcagacttaaacacctgtaagatttcttccaagttattccaagataatcagtagctgtcaatgtattttgaagcctaaaggaacttactcacctagagaagtgcaacccaggacattttccaaacacctggccaacgcttcgatatcactgtcctgtcaaaataagggagaaatgtttattttccctgtatggtagaaggatacttaataacatggaaaaatgttcttactacatttaggcgaaaaaaaaatctggttccaaaattatttcagtataatcctatttttaaaaagaaaaataactttatgtatatctacatcactctctccataacaatctctagatttattgctctatctgtcatggcaaaaacatacaaaaaaatgttagcagtggttttgactaaaagattaaattatgagtgatctttattgtctccttcstgtgcttatgtcttttccaaattatctataataaatacatattaaatctataaacatagtaaatgctattagaataaaagaaatattttattcaatttacaatttagtcaatacagcagaaatctaatgcattttttcccttggagaacaactagctcttctttggaaatgtatggtcttcaaggagtgctaaatctaagaataccactcgtcatttaccttaaccctcattaagagtcagacttcccccataacggttggggaaatcacagaactgtatttgattaaaaatattgtcttcaatacaaaataaatttgtcctccaccaagcaggcttgaaataatccaaaacagcatcctaatgatctgggaaaagtattaattattttcaggtttgtggttatactaaggaaaattaagaatttatggctgggcacagtggctcacgcctgtaatcccagcattttgggagtccaaggtgggcagatcacctgaggtcagaagttcaagaccagactggccaacatggtcaaaccccgacttgactaaaaatacaaaaatcagccrggcgtagcaaagattcagtcaaagaaaacatctttcaggagcatattatggccagtgtgattgagaattatgctgctgattggaacttttgcatttcttccctgtttcataatttaaattgaactttactggagctaagtggcctgagagagtaactgcatcttgctagatgccaaattacagtgtcaccagccttcagtcatctcagccaagtgctgggaagccagattttcaaatgctgtgaaaataacaacggcttctttgttgatgaacttaaatgttcttcaagtctccttcctccatagccacaaacccctccattataataacatgccttagagacatgaggaatatcttgtaagattcaattctgaaaaactgtcccacagattcaagtttagtcaaatgcccacattttttttcagaaacctatgcagtcatttcactaatgaattagacattgcttttatggaggaatggtagctgttctcaaaaggtccagtcagatccatgaagtacatgataactatcaatgcctgcctagcagccacaggaaaaaactatcatatctgaaggaatctccctttttagacaatgtcaaaatacaaatattgaaaataatgttttctctaacaattcccatttatttttaatctggaaaatatagaaaattatcaaagaaaataaataccccaaatcccactgctattaatacaaacacacacacataaacatatatagtcagtcttttctatatacatctatctcttagatatttcagatcatactatatatgtatgctatatgcatgcctatcttttagatatttgagattatactatatatgtacggtatgtgtgtctatacataaaatacacaaaaaaacagtacaatgtactgttgtacaatattgtttggaatattaaatttattaaattaaagggagttggtactgatataaaaaatgtttctgtttttagaacacacatttcagtcactgcattctcaggtattccaagtcaaatatgatgacatcaatagactgcattttaaaaacattgtttggtttttctgtttccaaacagaaaatgtacaatattgttcagacttttttctgacgctattaaaaattcttcagaagcataattttaatggctggaccattgctccctaaaggcatatcatatgtatttatccatacccttatcattggacatctagattgctttcattttattttgttttaaagaatactgcaatgactatctttacacatacatctttgtttcatgtttattgttatttctttaggttggcccatcagaaatagaattactgggtcaaggaatatgacaatttagaaaccctcctctttctctgctcttactcttttctctacactcctgcacttcccaacaagtatattttcttcacaaggagctaatatatgccttcatatttattttcattctcctatctattaaaatatgctctctgtcaagaagagatatgacagatccattaaaaccaaaaatggttgataaagtttatgtgttatctctctcaggatatttgtatttcataaggcatatgacctcatatcagaggagttaatttctaataggaaaagtttaggcagcagcaagcaggcaatctcaaaggagaaagtcagatggggtcttcacaggattgtaaaaatcacaccatgtagatcttcatttagttatcaggcagttgtttgacaaaataatccagatgatctcctcacttagagctagtcataacgaaagattcaattcacaagaaaaaaactgtgtcacttcattatccagttgtatttcattcagaaaatatttattaaattaaaaggggttggaactgatataagaaaatgtttatgtttttagaacagacatttcagtcactggattcttgtgtattccaagccaaatatgatgacatcgatagactgtatttttaaaatattgtttgctttttctgttttcaaaaataaaaccctgtttctaacaacaacaacaacaacaacaacaaaaaccaattatgtgtcaaatgtatacaaagacaaggaagagagatgaagccttagcctcccatttggagaaaaataatccttttctgacagtttgtttctcaagctgttgctgacagtcacttatccaagagactctggttgtggcgtactgtccaagctgcagccaactccagtgaaaaaggtgcagcaaggtaggaaagaggttttgccacacctattaggaaacaaaccaataaaaacccactcatgggagaagcctagttctaagaggtttgtttttcccaagtctaagaacagttagcctttctgtggataaagattctgagaaaggagccagaggaaggcaaggcttaaagacataagatgccatattcttccctcctccactatccacagtgaacttgctctcgctaaatgagttaaagggaaaaaaaaattacattgactaaaaacaatagataaatgatttggttaagaaaaatattgaccaagtttgaaacttaaagagttggagatggaaaaccaatgacagggttttgtttgaaagttaggtaagtgaaaaccatttacacagttctcattgaagctgaatggataactaagggaatgatatctgtaaaatgataactatatataatattatgtatattgtttggtaacaaatgaattgtgactgtgtgaatgaatgaatgaatgaatgaatgaatgaaagctacctagctgccacaagaacttagtttgggatgagagctcagtttgagcaccagcagtcccttagagattgcatatctatctttagatgttcttgagagtctcccaaaaggttattcttttgctcactgctccttcaccttgaaggtgtgaaaactcagccatctgtctacatctagcaccctcagcactctcctggctggtaggctatactgactcccgaaggcatatctagagaaggcttggcacatatcaacacacacatagatgggttcagagctacagaagtgttttatgtttccagtggctgaaagctgctctgagtgagaatggatgcatgcatgctttgctttcatgctgtgctgccaggcttgacaccatgtcctccatctgccaaacaatcctgagcaggcatagacctataaaggtatatatagagtagagtacgcataaccttctatcacagccccagctaggagaagtgctcagctgagcttcatcttgctcagaccccaggcacgtcctcagtcaaccttatgtcaacagatgttagggtataaacgggctgatttctttcacctcttggtcacctcttctctcagagccatcccatagagaagtaaatcccaccaaatcatgcaaaaccctcttcctcttccctcctcacccagagtcactctggacccatgttttttttttcctgagaggcttcatttgagtgtatccagaccttcttgaagctgtggccaggcactgtccacaagcagccaggaagtggcctcaatgcaggctgcagacctatagagctcatctatctacatgaatattgcaactctgttgtagtttttttgtagtttttctttttttgatgtaattattaatgatgcattatttttattgagataaaatttgcacatmgtgaaatgcaagatcttaagggtacaattctatgagttttcaaaaatgtatacacctgtgtatatgccacctaaagcaaggtaaagaatatctctatcatccccaagatctttttgctcactatgatctttttgctcactatgcagtttctggaacgcgcccaggttttcatgacctggagctttccctcactctctgttccctctctgtgaagcactcttctcccagttcccttttgtcccatcaagggctggctcctttccatcctccaggtcatggctgaaaagtcaatctctagaaattctccttgacttcccttattagtaggtcttccctaaaccccaaatgcccattcctctatcacttcagcttctttgttttctagttgctcttacttctttgtttgtgtcctggctaattggctacctgtaccactagactgtacactgcatccattcattcacgtattccacaatatctactaagtatttgttctgtgataaacactgttcaaggtgctgggaatatagcagtgaaaaaaaatagaatatctgctctactggctttcattctagcagagggagacaggccataaaagaataagcaatagtggccactcagacggcaataaagactatggaagaaaataaagtaggagaggaaagaggggattctcagtccagtgaaagctatttcatataaggtggtcagagtcctccctgataagatgacatataaacagagacttgaagacagggagggagcaaatcatttgtgtatctggygggaagagcattcaaggctcccaaagccagggacatgcttggtgtgttccagaaactggaagggtggagtgagtgaggacaattctcatgttgatggaagagaggggcttagtgaggtgatgatgatgaagtactgaaaagcctttctttgctttgaatgagacgggagggttagtaggagaccagtaagaagctaygacaaggtgatgatggctttcgcagtaggaatgcaggtagtaagtagtggtcaaattccaagtatactttaaaggtcaagccaataggttttgcttatggattggatatgaatgtgagtgaaaggatgtcagtcgaggttggctcaggaggagctaatttggactgagggtagagtatatgaggggcttaactttagtacatgcttatttcaggatgtctattagagactcctaaccctactcccaggcagactggatatgtgagtctagagttctttcgtacatgcttatttcaggatgtctattagagactcctaaccccactcccaggcagactggatatgtaagtctagagttctgcgaaaatagaactgaagaatagaaggcacacatttaggagatgtcaatcaataaatactatgtaaatatgtaaggctgagtgagatcccatgaaggtggaactatgtctattgtgttcactaccatatacccagtgcttagaccattcaaatatgtgatgcataaatgaatgacccaaaaagtaactcatctatgttgcatttctaaaagtgttttcttgagacagggtctcatctgttgcccaggctggagtacagtggcttaatcatcgctcactgcagcctcaacctcttgggctcaagtgatgttcctgcctcagccacccaagtagcttagtgccaccatgccaccatgctcagctattttaaaatttttttgtagagattaggtctcactatgttgcccaggctgctctcaaactcctgagctcaagcaatcctcccacctcagcctcccaaagtgctaggattacaggaatgagccaatgtacccagccccacctacttttttctccaagttgcatttttaaactatcatctactctcccacaaatggtgtccagaacagccctggaaaatgtcactaagttacagaaaccaaaacaccaaggtgaccttatccatcttcttcacactcagatgtacctttcacatctcagcttgaactcattagaagccaagcccttgcttatatgcattcataattcataggaaggcagaagatgccgtttagcacaaagccataggacagagctgatggcacctttgtgagggcttccctgaaatcaggaagctaatatcgtaactcctatctcactactgatggtggccttctgccttaaagtgtgtgcggtgataggaacacagagccacatctgcaaaactcaaactgccaacaagcccccacagctcccataagactaaaagcctctttcactgaattccgaattgctgaaacgtgactgtcaacgtgtccacatttcactgctaatgccttgtttactctgcattattaaaaccttctaactgcagctgtctcttattaatgcccaggttctcggcaagtcaatgcctgtgggattgctttagggtttcaaagacattcataggtatccaatgacagaactcttaagacatttagaattacggtttagaaatgtaaaggataaagagacgaaaaaaaagcagggctgayagaatggcaacgtaacacctacccaaaacagggcaatggattttccaggaactggtgaggcctgtactccctctgcaacaatccatttctagaattccagcacagtgaaagaaaagctacctctaatcaatccttccacttgctctttattaactacttaatctctttccactctatacatacaatagcctagagaagaaagtcctgcaatttaagggaggtttattgccacaaaaacacaagaatttttcagtccaaaagatagtcattgtgatacacagttgtttattgcagatttctatttttaactctagttttagctttacttttatttaaatcccacagagtaagtgaaaaatgtagccctgtgatttaaacatgattttaaatcatcagctcatagtccattttcacacactttggagctgtcacttaggtcccaagaatctccttttcttctcctttaccaacttctacattaagttctatacttactccaaattcctaatagttggtacaacgaatatttgctggtttaaaccccagctctgtcattggatggggtaacttaggtcaaattagttawtctgtctgtttcatagtcttctcatttgtaaatggtgagagatgttaattgcattgagtgctgtgagtatgaatgggataaggcatgtaaagggtttggcacaacacctggatgctgcaaggtagctctgtcttattatgactggtgttttcccagggatgacatagacccctgtgccttcagattaccaggttatgtgggaacaatgcacccccaacaatggcccccatgtgtcacaaccctttcctcccaggctggacaccatgaaatggtatttactctccctgtctaggtgaatgaaatattcagaaaattaaaataaatttctgatcacaaaacagttggatgggacttgtatttttctgtttgccaacgctgtttaggatggttttcatattttttgcagggtttctgtgcaccatatggtcagggcacctcagctctgatgatagctagggaaacagggattaatgtagggtagtggagggagaagattgttggagagaaaagcactagagggtccaytgcaactactcttatcagctgtgtctcaccactctcaccccaaagttccaggagcagcacagcggagcacagggcatctcacagtgaaggtcaccgtccctttatttgcccattgacctgtggacctctgatcagccaccaacaagggagactgtggggctggtgacctctccatcttcacactgaagggaacactcagacactttgcattcctgctcagatttgctttgcccttttttcaccctattgcctttctcctttttctccatgctttggtattggggtgaaaaatgtaggtgtgatcctaaaccctataatggacctaattttaaagacttaatgactaagcctcctacaaagcccacaaactcacgcatgtaccccctgaacctaaaataaaataaaggccagaagaaaaaaaaagaatagtatatcaaattgttaagagaagtaagtgatataatgtaaaaaaaaaaacaaaccccactgtgctgtattccacagcaaggtttgactggtcctaatatgactagcaatgagctatgctttgatctggacaagaaatgggagagagagaagggggaagaatcatgacggaaatgagggctgggatggggggtaggggtggaaattgtcacctcaaagtctctcctttgagcaacacacagtctacagaaggcccatcacctagaaggaatgacacaccaaactgggagtatccactaacactgtagcaaggctgatggctttacagcctgggacacaggccagcggaatgctaatggaaaaatgatcgacaatctgaaacagctgggagtctgctttttagaactgatgacctctaaggtcgatttaagacaaaaagtgtttcttcccaagtatgaaggtaaattaattaggtcagatcatgtaaaaataacaggcaaataagtcccactactgggactcaacagttctggcaacttatcttaaaaaagaaaaggacatagtaggaggagataaatctgtatcccataacagatgagagatgttgggtcttttttgttttacttttcataactcagcactcttcctggaactggtttaaattttgccttgtacatagcacagtcattctgtttagtaaaaaggtcttgccagagtaccagataatgcaatggccctgcagctattcccttgcacctaacgcatttactctatcatcagtggaggagaagcaattctaattgttgtgcagaggaaagactgtataaagcagaggctaaaaataaattcatacagtccagttctgctacttactagctgtgtggtcttggagatgtaacttaatttccttatgcctcagtttcctcttgtgtgaagttaggatgtcacaaacagtatctttcaagggacctaggttttaaagtcagcacttgaaatatcctccactgctgtttcttttttgagcaaatgaaatagctgatttgcacgtagggactagattgtgtgaaaaatatgtatctgaaatactggaagtctacaacaataattcaaagcaacaagaggcttacagtctgagagatgcaggaactgagatgcagtagagggactggatttatatctctcagctcattttgactctggagcattcagtaaaagtcacatgaaatccctaactcatgatcccttcctttctcctaccttcaccttctcctttatctctgccttctcccttatttgaattccagccagttaaattctagtttgatgcagttcatctagaatatatgcatcagagttgttgcaagaattaaatgaaataatacacctgtgacagccatgagatctgccacttacaagtcccttcaagatagaccctgctgcaaggagcctagtgatctgacagccctcggctacaacaccttcgggatccaatgcagggtccacgctgaggccctgctcttcccaggcaactcccaggcaatgtaagcactatggggaagttagggccaggccattctttcgcagtgctggactccagcaacacaccttgcgctccctcttgacagggccaaacctttttcagaattgcagtgcagcctgaggctcccatccaattgctccctctctctctccctccctccctccttccctaccttccttcctgcctgccagcctgcctgccaaggttttatcagaattgcactgcagcctgaggttctcatccaaccttccttccttccttccttccttccttccttccttccttccttccttcccctcaaatatatcagtatggtttaagactcctcccacctacttgataggaatttcctttttatttctaattctgtctcatcacctgcttcctggagtacctgaactgacacagcatgcaaagtaccgagcatagaatgaagattctggaaatactagctgttactgttatcattactatgatctgattaaactaatgactcaactaacagcaggaactcttggaggcacctaccatcatgacaatcagatccaagggtcctcagcagaatctcaggccttgcctatcgcatatccagttctctgccccgggacaatgttccaagaagaaaatcaattgtttwtcctaagaatttcaaaacctctgaatgatttggggaaaaagcattgagaacttcagaattaactggaatagtggaactctgccgcctttcatcttaggaagaacaaacaccatagtcctgaagagccttcttaaaacaagcctcagtgacagccacattcattaaacaaagcccttccgaggaagatttgtgtcgagtcattattgtccacctagtatgtgtattactggatgcatctgagccatttattagtcttggagagaaaaatgatagtcaaggcagcaaaggaaagacagaagagtctgtgaaaacactcgtcagcctgtagccctaarccatgtccattagagcgcataaaacactttttagtgacaggttgcacaagtgttgtggagaaccctgttatgacggcagctataaactcaattctcctgagatctaagatgctggctccaattcagtgaccacagacttggcagaggagccatcaacaatatgataatggcttgtgataaaggttttattgatgctgtgcttatcacagcagagaaacagttggcaatcatcagcaattaggtgcttaataaaactgctttggagacactgctactaaaaagattgtcatgggtggcacaaagaactcagtaatcaatctcaatgaagtccatggctgtgtttctttttgaaagcacttctttcatcaaaataactatgtgactttggctccatctaaaggaaggggaatcaactttgatctgattacacacatagaaggcatttgtgtgatgaccatctaagcagaccctggcacactcagaggtccagggcaagaccagggaaaggggagaagaggccaatctgagagatggcagcaggtctctctcaattcacaaagttgaccatgactgagttctgtagtgtaatttgtatgttgctaatgaaaataacctgaaagggaagagtccacattcatcacctttggggaaggagaaactacattgaattactggaagaaaacaaatggggttgtaattacctgtctctaatacaaattactctattgtgtaattgtttttgctactctaaacaaattactctattttttgctaatctatacaaattgctctactgtgtattgtttttgctactatagaatgtatattgacctagaatggacttggcaacannnnnnnnnnnnnnnnnnnnaaaaagaaccacagccatggacttcatgaagactgattactgagttctttgtgccacccatgacaatctttttagtagcagtgtttccaaagcagttttattaagcacctaattgctgatgattgccaactgtttctctgctgtgataagcgcagcatcaataaaacctttatcacaagccattatcatattgttgatggctcctctgccaagtctgtggtcactgaattggagccagcatcttagatctcaggagaattgagtttatagctgccgtcataacagggttctccacaacacttgtgcaacctgtcactaaaaagtgttttatgcgctataaaagacatggcttagggctacaggctgacgagtgttttcacagactcttctgtctttcctttgctcccttgactatcatttttctctccaacaattcaatatatattctatagtagcaaaaacattgacttgagaatgtgactgatgtgggcctgaggcatgagtctgatccttgcctagctacgtgaccgcaggaaggctacacctctctcagaaactaactttcctcaattagagtgagcagagatcatgccactgcactccagtctgggcaacagagcgagacactgtctcaaaaaaaaaaagaaaaaaaagaaaataggaataagataactacccaacagggtttgtgagacaaaataccaccatgtatgtgagaggctgtatttagtctgttctcacactgctaataatgacatacgtgaggctgggtaatttataaagaaaaagaggtttaagggactcacagttccacatggctggaaaggcctcacagtcatggtggaaggtgaaagccatgtcttacctggctgcaggcaagagagaatgagagcaaagtgaaaaaggaaaccccttataaaatcatcagatctcgtgagacttattcactaccatgagaacagtactggggaaaccaccccatcattcaattatctcccaccatgtccctcccataacacatgggaattatgggagctacaattcaagatgagattcgggtggggatatagccaaaccatatgagaggccttagcatcttgtcccaatagattacttaaaatcaatcacaatctgtcatgtaacatgtgatagatatacaacccagagaacaaaactgctgcccttatgtttatcatctgccttaagactaataagaaggaatttttaaaaaattacttaaaagcaagttagaaaatctcactttaacattaaggagttttggcagtatcataaagaggtactggataccttgactgagtaacttcataataataatagctaatatctcatgaagtattttattaaattctgagcattattctaattactttatattgattacttcatttaatcctcaaaaccactctgtgaggtagaaaccattattctcccactttacagattagaaaactgaggcacagtgaagttcagtaatttgaacaaggtcacgcaaactgcaagttataaagacatgcaagcaatctgttttccaaccctatattctaagtgccaaagatggatattctgagactggaaaaattgtatttcctgacctaggagctgtttgccatatagtattttattcatgtggttctaaatctgttttattttcttaaaaaacatttctaagtgwatattagtagctaaaattttaccgcttgatgctttgaccaaaaattgagcactgtatgtattttgcatatcatgtgttttgcaaccataggcccagaatgaaggctctgtaatgctgcaataatatccgttacagttgtttatgacagtggctcagaaggtagtagaaattatattttcgatttgtggtaggaggtgctgttgttttccagattccgttggaaaaaaatggggaaacggtataagctaagtttttattttggcattctgaatcccccctttagctgtatttttctccaaatgtatttgtttctctcttcatgtatttgtctcctaaattatctctctctaatcctttctcttcatctctttctcctctttatctcatccctttttttgcttggccccatacctgtacccttcacttgcctctctctcttaatatcaaattggagagcacttcttactgcttttatttattgaatattatgacacataatctttattaaaatggttgaatggatttaagtggctgaatggattgaatattatgatatattgcatagtctttattaaaaatggttgaatggatttttggagtgaatcatcttcactccaaaaatcatctcctctagctgagtcttcactcaggtgccctttggtagacttttattttagtagctgcatggttctcagttaacaaaagcttctgtaactcatggaagtttaggattggaaggtaagaagaaaagaaggtatgtatgcacattgcccaaagctttccccttcatcttcataagcctcttgctttttattcctctgttgcagacactcaacactgaaagcacatgtcaggggtgtttcttgacctatggcccatataaggcttaatcttgctatagttaaaagagatctactacaagggcatagggcatatactcagagacttcaccacttaagcaagaatgtgtcctcagaggctaaaagtagctagacagattatcccctaagcccaggatctttggttctgatccccaaaactaagtcagtctttacaaattttatttgcattcaatttgtgaatatgaccccaaaatatgattaccagacagaaaagtatataaaaagtgccattctctctgctaaagagatatttgcattttttaattcaatagctgtatacgaagccctcctcagtgggaatatggtgtgtgccatctcccaaccccccaaataagtgcagcatgctccagttcttcccccatcaacatggtccagatcagattctccaaattccatagggccctgcctgcctctggaccttgaaaagccagacttaccacaagtagctattataataaccctgttccccatgtccccaacttcaccttataagacttcctttcttctctgggagagtccaatcagtaccttgaacagttccatggcttccgacagggagcattacatacctgttggtttgttctgtaagcaggctgggatccctcattcctgatttctttctctggtctttctaacgctatttcttcttcctcctcatcactctctwcacaataggaatcaaatgcatcagcgtagtactcttcagccacaagtgggtcttctgggatctctgaaataatgaacaaacagtcagatactaccagttattaaaattataatgaggtaagaatactgtatcttttcacagggatgtatattttgcttgcgytgacaaagcttccatggagtgtagagctgaatctcagcttcctggaagtatttggttgaatgtaataaacactcagcaaaataaaaccagtagaggaraggargaacatttccattagcaactacmgtttgaaggtaagaaaaaaatcattaaataaraataaataatatgctttaacattttgacatttggaggcatgaatccttattaaaaatgaggaaatttaggggcaaaggtaggacaagatgtcctggctgaagggtcctattacacaacacacataaagtttttagcataggaagttggagcaaaactaccacagcatttttcctagatatttctttttttttaaatgttactggtaggaccaaacaagatgaataggatatatagcagcatcattttggcaagctgggaaaaacacaattcttttctaacaggtaatgatggcttttgagatggagttcactctggtgggtcctacttactcaaccttacattcagcacttattttaaaaaagaatacccacctaagctgatgacaataagcatctacccaagttacttgatgcaacattgttagtaactagaataaagttggtgtttataacaatcttcagtgaagaaaggccatgaatggatcacaagaaagcataacaatataatttactaatggggggctagaaataaagaactacccaaacaactacccttgggctgggggaggagaaaattagaatactcagctgcagcaaaacaatgggcattttagactttgcaccatactcagacttaaaattaaaatttttcttccaaattgtaacacattatttttcaatctattgttgctatttctggtctagtgggaaaaatatgaaatttggggtcagaaaatcaaggctagaatctagctcttccactttttagatgaaaatttgtgcaagagacttaaactcacagagctccaatttctgtgataaaattaacataagtgtaatctagtagagtggctgctgagattgagtaatagaattctcatgaaagcatcggtatgcagggaagtttcatacaaatgttcactcaatttccaagtctgtacaaatgggcttttcattaaatgagtccagaatcctttgaaagtaagatacttaatggatgtagaattccctggaaatagaagatgttaaaatgtgtttgttatctatggtttcccactaaaacataaaaggctgctgtacagtagaataaaaattagtcagctcaaaagacaaaaattacatatattcaaaattgcctttgccagttccttagaaagcagtgtactagggatctcataccttctctcagcaatttcaacacagcgtatttttttttttcacatcagttcagatcactgattttcagctgagcaacagatgagatagaatactgttatggagaagccatagtttttattatttttattatttatattgaaataatatatattatttttattaaacgtggcttctagtcattatatcaagaagacacctgcacgtgtctgtatgtacacatatatatataacatacctatacacatatgtacatgcatatagaacttcaataccttttgcatacaagtggtttttggttacatgggtgacttttgtagtggtgaagtctgagattttagtgcaccctcaccgagtagtatacactgtacccaatatgtagtcttttatcccttacctccctcccaccctcctcccttctgagtctccaaagtccattatcccactctgcatgcctctgtgtacccatagcttagctcccacttataagtgagaacatatggtatttggttttccattcctgagttacttcacttagaataatggcctccagctccatccaggttgctgcaaaagacagtatttcattctttttttaatggctgagtagtattgcatggtgtatatatgccacattttctttatccactcatcagtgatgggcagttatgttggttccatatccttgcaattgtgaattgtgttgtgataaacataaacgtgcaggtgtctttttgctgtaatgactagaagccatgttaataaagatcttcattttacttacactgagaacgacaagagaatcacagcatgagaagtgtatgaaaactaaaatctcctgagagatctccagttctgccatcaagtagggacatgtgcttgctgagtggaatgaaagacagaaccatatgatgtcttccttctcttgcccaccctcaactctccctgaatctctgtgtctctttctctgagttgtccattctccctctttccccactcttttctacttcctctccctctcgagtctctttgtccctttgacagttattcattctctcactcattcatatttttccctcttgctctcccattttttctttatcttcattcctccttgtccactcccttggctttcaaactacgacatggtaagaaatatcatttacattgttgcccagtgcacagaaatgtgcttatatatgtatgtttataaatatctttatagtcgaaacaaaagtttcatacaccaagacctatttacccaaactacatatgacacactctggtgtttttcatcctgttcaattatttttttaatgctggttgcaactcactaaactgacctctcaacctgcagtttgaaaaacaccccaacctagctagagaggccaacattcagaaacactcctttagaatgctggctttggcataaaaacaaaatctgcatttaaatcaagcctctagcaatagctctgtaacactgtgttatttaagctttctgcacttcagttttctcatctataaaataaagatgataatattcatctcatggaattgttgtgaacattacatagtataatggatgcaaagtatgtatcaaataaggcaaacactcagtagtttttcctgtaayacccaacaccaggaagaaataagtcatgcatcacttaacaacgaggatatgttctgaggaatatgtcattcaggtgatttcatcattgtgtgaacatcatagagtgtacttattacaaacctcgatggtataacctactacacatctatgtttatgtggtatagcctattgctcctaggctacaaccctgtacagcatgttactacactgaatactgtagacaattgtaatacagtggtaagtacttgtgtatcttaacattaaaaatgtacagtaaaaatacagtataaaagattttttaaatggcacatctgtacagggctgttaccatgaatggagcacgcaggactggaagttgctctgggtgagtcagtgagtgagtggtgagtgaatgcgaaggcctagaacattactgtacgctactacagacttataaacactggacacttaggctacactacatttataaaaaatgttttcccttcttcaataataaattaagcagcttactgtacattttttaaacttcttgactctattgtaataacacttagcttaaaacacaaacacattgtacagctgtacgaaaatattttctttttttcatatctctcctaactaggagatagtcaataagcattttttctttctttttctttttcaactattttgttaaaaatgaagacacaaacatacacattagtctactgctacacagcgtcaggatcactgataccactgtcttccacctccacatcttgtcccactacaaggtctctaggggcagtaacacacacggagcctccatctactgtgataacagtgccttcttctgaaatacctcccgaaggacctgcccaaggctgttttacagttaattttttttaataagtagaaggagtacactttagaaaaatgataaaaagtatagcaagccaggcatggtggctcactcctataatcccagcactttggcaggccgaggcaggcagatcaccagaggtcaggagttcgagaacagcctgggcaacatggagaaacccaatctttaccaaaaatacaaaaaattagctgggtgtggtggcgcacacctgtggtcccggctaactgggaggctgaagtgggaggatcacttgagcctggaaggtggaggatgcagtgagccragatcgtgccactgcactccagactgggtaacagagtgagaccacacctcaaaaaaaaaaagtatagtaaatacataaagyagtaacagtcatttgtcatcactatactgtacataaatatatgcattacacttttatatgactggcagtgtagtaggtttatttacccagcatcaccacaagtatgtgagtggctatgttgctctgcaatgttatgatggctatgatagcactaggtgttgggaatttttcagcttcattaactggaccaccattgtacatgcagtctgtcattgaccaaaagattgttatgcagtgtatgactgtattagacaattgcaaatatatactcaagtttaaaatatttatttattttaaatagaataatttctcaaaatccatactgaacccaactgaaatgggcaatatggaatctcgcctctctgtggtttcctttctgtggactccacaggaacccgcaggcatttcaccacactgttcacctcccactgtccttcctgtccactgattccgtcaaggtttccttcaagcagctcagaagaaacctctgcaaggggggttgacaaatatgttctgtaaagggctagatagtaaaacaattttaggctttgcagattacgtggtctctgtcacaactacccaactctgcctttgtagtgtgaaaacagacaatacataaataaatgagtgtggctatgtcccaataaaactttatttacaaacataggcagtggaccaagtcatatctctacaacacagacaaacctttcttttgttaaaacactaagctcctcttcccaaaacgtagctcattgtgtacagacagccttagtccctttccctctcctacctaagatttcctcctagaaggggaagaaggaaagaagtggccagggaaaagtgccattctgccacctaagttatgaaacaaactggaatgaatctgtctccagtatttcttargtaagcaccactaatttggtgctgcccacaaaaggactcattttcattttcaaagggaaaagtcaaaaaaaacgtaagtccgttcaaactgtgtttgtcacgcctcatgtttttcatacatagacccaacttgaagccttcttagcttaagattcctttctcctgtcactaaggggaaaagagtctgataaacagctttaatttccttgcaccctgaagtcagcctcataatgggtatactggagtggcattccagatcttctgtatgccaggcaagcagtaacagaatgtgtttatgaaggaatccaataatggctgcacgagtttggacacagatgtttcaaatccatgctggaaaaacgaagacatcaccctgttccaggaaaatgatggcctttatcagatccttcaattaagacccaaataaatgcctttctctaagacttgtgtgagcatcaggatcacctgtgggcttgttaaaacggatctctgggtcccaccccaagacttgctgattcagcaggtctggtgtggtacctgagaatctgcattactcacaagttcccagctgatgctgatgctgctggtttggaggctgccctctcagaatcactgctctagaatgtgactagttcaaataagagtatacactataataaaatctaaaagattttatactatttctacatatttcaacctttgtatgttaaagacaaaacataaacgtaagaaaaactttaccttagaagagctcragttactgtgctattagttgtctaaattacttaaaatctccatagaggtataagtaattcaactactcccattttgttgatagaaaagaacaaagctaagggtgagcagcccaaagttataatctttatatttgtgtgcattttacagtttaaaaagcatgctgatatacatttgataccacaaaaatttgataccatttaatagcacaaagataccatttgatctttgcaacaactcttcaatgtagactagaatgacatttttctgcccacttttcagataggaaaagtaaggttcagacaagctaatgaccaaccgaaggtcacactgctgcatctgaatcccctttctttcactgaataagtctatttatggttagttagaaattttcatctttgctagtaaaaccatttcagaaaggtcatgattatctttcttgtagctctgaaagatattagacaacaagggatagacttttgacttacgagatagaaaaactgaagcttagtcatcctggtaaaccgtcttaagggagctgggagaatcagattcagcctgagcctagttctcactaccatctatctcagatgtgtcaaacttgagtgtgcctcagaatcagctggaagccttgttaaaacagattcttgctcccacacccagtgtttctgattcagtaggtctggaatggggcttgagattctgcatttctaactatgccactcgtctggaaacacactttgagaactattgctctatcttatagaaccttcgaggagaaaatgacatacagatgcaactgttaaatgaaaaactccctgtcacttcatctactgcattagctctttaaactgctaaaacgatccagatatacattaacaatttttttaaaaaagagtgttttcataaaacaggaactttgcctgaagagaaaaccaagtttcctctaaaggaacttagttccttttagacatttagaagatctcagcctgtgggcccaccaccatcccagatggttttaaccattagaatgccttaagcaaatccatgtgacaggcttcccagaatggttcttaaagggtggtccccagaatagcaagaacaacatcacctgggctcttattaaaaataaaaatttccaaatttgcctatacctccaacctactgaatcagaaactgggatgaaggtccagcaatgtgtggtttgacaagctctccaggtgatcctgatgcacccttaagtttgagaaccactaattcagcacaatgactggcactttatgtctgctgaaataaaaatcccttctaatattccaggtagatggtaagctccaggagggcagaggccacacccatcctgcttaccatggtatccccaacacatgattcaaagcagacacccaaaacttcttgctgaataaatgagtacataaatctctaagagataaggactttcaaattgccacataatatcatatacaaagaattaactaatcctttgggagagtaacgtggagaggggaagctgaggagaggaaggagatacagatgtttttcctaagactcccccacccctttcctctttttcacatactttgaacttatatctcagatgtagtcataccttcgaactgcaaaaaatgtcttcatcgtactaaaacttccagttacatcctgcaggcccactcagtcaagtcccagaactcagtcaagaggacccagagtgtgacagcaaatgctgttaggctggagctttctccaggtgccctagagtctgccccggacaccctgcctctctctgcatatctaatcatagttcagcattaaagtttgcggagctggctgtcatggggcagacagagggtgggtggtgggagccctcagcagaaggcagctaccaaaagatgtccatctctatttgtcctttcttttctagttttctgaagagggtaatggctttattacaccaagccagaaaatactgaacaaggctattataaggctctaataagaacaaactgatttattcttgtatctcaatgtggcctctatgaagaccatgttcattcattacaaattgggagtggcagtgcttagaatgattacagttattatttgtattaacatgacagccatcaaagcatttcttaatttcccaaaaataacatttgtgggtgtgaaaaactgctcaaattcatttttaataaaaacattaaaaataaaaatattattttctcatatgtataggaaacctatgattaatatgctacaacgtccccaaaaccataagatttttttttaccttttacataaggtaaaagtcaatactttgagaagacacacagacataggcattgtgctgagttgcctcaatttcccccagaagctccattttgtataaggtaagcacaatttagatgaaaacaaaacaaaacaaaacaaacaaaaaaccaaaaagaaattgaagtcaaagttaactggtgacatctgctgcttctgagaaaaactgccttgcaacagaagtgatgatacaaagtagtgactaggaggaccacctgtagggtcagatggcaatcaaattctgcctccgttgcttattggctgtgtgacctcaggtgggctacttcacttctctgggtcacggtgttctcatttgtaagtgggtgtagtggctactatcaatgccccacacaaattctcttcccagacacactccaaagtataattggcacaccctcgtctgctagctgctgtgcatgttggctgctgtattaagtcagccagagctgtaatgagaagataccacagattgggtgatttaaacaatagaaatttatttcccagagttctggaggttggagattaaggggccagcagggttggawtcctctgaggcctttctccttggcttccctcttgctgcttcttcacaaggtcatcctctgtgcatgcataccctggtgtccctgtgtcctaatctcttattcctcttttttttttttgtatactttaagtttggggatacatgtgcagaacatgcaggtttgttccatggatacacacgcgtcctgatggtttgctacacccaggtttgctgcacccatcaacccatcatccacattaggtatttctcctaatgctgtccctcccctagtcccccaccccctgacagaccccagtgtgtgatgttcccctccctgtgtccatgtgttctcattgttcaactcccacttatgagtgagaacatgcagtgtttggttttctgttcttgtgttagtttgctgagaatgatggtttctagcttcatccatgtccctgcaaaggatgtgaactcatccttttttatggctgcatagtattccatgttatatatgtgccacattttctttatccagtctatcatttttgggcatttgggttgtttccaggtctttgctattgtgaatagtgctgcaataaacatacatgtgcatgtgtctttacagtagaatgatttataatcctttgggtatatacccagtaatgggattgctgggtcaaatggtatttctggttctagatccttgaggaatcaccacactgtcttccacaatggttgaactaatttacactcccaccaacagtgtaaaagcattcctatttctccacatcctctccagcaaccctatcaaaaagtgggcaaaggatatgaacagactcttctcaaaagaagacatttatgtgaccaacaaacatatgaaaaaaagctcatcatcactggtcattagagaaacgcaaatcaaaaccacaatgagataccgtctcatgccagttagaatggcgatcattgaaaagcctaatctcctcttcttatgaggacacagtcagattggcttagagcccaccctatcagcctcattttaatttaaccacctctctaaaagccatgtcttcaaatacagtcacattctgaagtactgggggttagggctccaacatatggcttttagcggggactcagtgaagcctataacagttgctgacagcacacagatactctattctccacagaattgttcttggatcaaagaagccctccttactgaaaagatgatgccacatctctgccccaggggcagtcctggccaatgactgagtgacttaaggtaaaaccatctttgtggtgttactcatgccccagagctccctgtgtgagcagactgaggctagtctccagctgagaccacatccttgctcagctccttttatctggacacagcccccaaccccacaccaaactctatatacacacacccacatccttagagctctccacaataagatacatgcaccagatacccatctcaggctgtgcttctaaggaacccatctaaagacttggacattataataaaaatatcttgactcatggttacaaaacaaaatataaaggataagagataaacatctcttaaagaaaaatagtcaggtgccagcaaagtcacattctttaatattataactttaatcctcagaccttcaagaaaataatagagcccacatctgtggcactgctaaagtgagtcctttgtcagatatcaattacatctcagatgactaaatttttttctctctggaggtttagtctcctggccctcttcaaagtcttcttaaaatgcttcatcttgcataatgtccagaacatggtagatgctccataaaatggcacttattaatttagtaggtagaaagattcgcttttataattgttgttgtgagaattttttttaagaaattgtatttagaaaaatacctaataaaagtgcagggaaagaaaatgatatgatcccttctgccagggaacaagaggagggctttggccctgttccagaaaggtggagggaaagagagtgggaggggccagagtgagatggtggccgatcatgtgctctgtaagacgccaaattcacccgaaacttagcataaatgtaccatctaggtttgtgggagtacactctatgatgtttgctcaatgacaaaattgcctaaggacacatttctttgaacgcatccccgtttttaagtgatgtgtaactgtacacataaagggccaacagcatagctagaggaaaacacttcccaggcagaggtcacctgtccttcaggatgacagctgaactctcccaacaagataaaaaccactcctaaaaccccagctttccattctcccagcagcttataaggatacccagtctctccctcccccatgccttccccggcactattaaagaaaaaaaactgactcttctgatactttgctgtttgggaaaaggcattttatccatctcaaaacttcaattcaacatatattgtattttattttttccttttcaatttttaaaagcaatctctctccccactgtgaaccatgaaatagtttatcagagttatgcagtgagtcatcggctgggcctcgaacactgtgttcacggtgtcctagttcccggtgacagcagttaagattgctcattggagctcagaagtcatagagagggaagggcacactctgagacccacaattgttcctttccctggtgactcatccccttttatgataccatgggcccctgctggaggtcccagagaagctgttactccacatgccaaatggctgctgcatctctatttcattacaaagagccccctctgcgcccaagggaagcaactgtaattttcaatcaccgtaacatttagtgggactggaggcatgcagcagcatatttgctaagaaatgtttcaaaccaatgttcaagccagagaagaatatggacagcccccagtgaaataaacacactcatattctgagggagaaatgaacagtccaggtatcttttaacactcaggtctgcaatcatctcctatcttccattggcatcatgtcttacacaggctgctgcagaaatgttttgaaccaatgttcaagccagagaagaatatggacagcccccagtgaaataaacacactcatattctgagggagaaatgaatactccaggtatcttttaacactcagctctgcaatcatctcctatcttccattggcatcatgtcttacacaggctgctgcaagccttgcctaatgcactcaccatgtgactctcccctttcaatgaggccctcgctgccaataaaattgagtataaaatcttaagtttggcaggcaagaccttttatcatttgcaacccacattcccagatctgcctcttcttaccaatgaatatggtagatctcatttaaaggttatgtaccaaaagactctgattgggctgtcctggtctgggtctaggaagctttatttttctgatgctttccagatagttctcatatgtaccttcagaatcctggctttcataacctgaactctgtatttttccctgaattcactcttgctttcccacttcatctctttaaagtaccacttcttttagaattgacctaatatggtagacactagccacttgtggctatttgaattaaaattattaaaattaaataaaatgacaaattcagttgcactagctacttttcaagtgctcaatagtcacctgtgacaaaattatagaatatttccaacactgcagaaaattctactggacagcactgttctaggctgtcacctctctaaatagaggggcacagcctccgctttcagtttggccagatttctttgaagctctgggatgtgagtcactttacctctctgatcctcagttcctctcctggccagcacaccatctaccatcaccaatccccacctctgcaaagagaaggcagaatctcctggcccttgaaagtgctccagctctcacagttgtggatgtagcaggggagaggtagtgtctccatcgcaccccagccctaagcctcttcatgtaactgagtgccatatcaaaggatgtatccaatcaaatcttctcatctgtaagatgcccttttctgccttcttttacaccatatctacatgcacaggttgaataaatgcccaaccccagccttctgggcaacccccttgcccagagaaaggcaagctcacagacctcccacacccccatggtagacaatatctttcttttcttttttttttatatatttttttgttatactttaagttctagggtacatgtgcacaacgtgcaggtctgttacatatgtatacgtgtgccatgttggtgtgctgcacccattaactcgtcatttacattaggtatatctcctaatgctatcccttccccctccccccgccccacaacagkccccggtgtgtgatgttccccttcctgtgaccaagtgttctcattgttcaattcccacctatgagtgagaacatgcggtgtttggttttttgtccttgtatatttcacagcacagcaggaatcaagtcaactttgagaataatatcactaactgcaagtggaactgaacctcaaatacaaacaatatgtttatattcttaggatgggggtgcacatcagttgcttggtttgccatgatgctttctttcctcacacaataaactatagggttagtaccgtgaccttttctaaaacaaactttcaaaaccagggctaaatttaactacattgattagcttagcctacagcatcacacatgaggttgtgaaaagaaataattttcttagacaaaatgcatattcatgaccctttctggagggctaaattaagtacagtacagtactgttttttatatataggacagcaggttctgctgtaagtgcctctctaagtgacatctctatatttgactgagtgtactaaaagctctccactccmtgctacacacacacacacacacacacacacacatgcacgcacattcacgtgacagaaataagctccatgatccttttggaaataggtctccctcaagctctagartctgcacttttatcctatatgtcaagatgattttccctcaggaaaaactgtaatgtttccctgaaacttttctttcctgctttagagagtaaaagcgaaaatgacaaggtaacatttgtcttttctcccccaaattcagagaaatgaattcaggccaggaaattcattctgtcaaggagaaatgtagaaagacttcacagagactctgaaaaatttggtacatagtgggatgtgctgtgtttggaggcagaagacaactcgttctatgactttaggcaactggtttaagctcccaggccttaggtgtcttacgtgtagaatgggatggtgataactcaccaaccttaaaaccagagcctgaactgaatgatttcaggttacttttctgcattaagacttacaaatttacgacaaggagtaataaactagaccaatatcttagttagtttgggcttctgtaacagaatactatagactaggtggcttaaacaacagaaatttatttctcacagttttgaaggctgggaagtctaaggtcaaggtgctggcagattcagtgtctggttgaaggctcccttcctgatttgcagactgctgtcctcttcttgtatcctcatatggtggaggagcatggaaacatagagacaggaagccagctttctcatgtctctacttacaacggaactaatcccatcctgtgggctctaccctcatgaccaaatcacctcctaaaggcctcatctcgaaatatcatcccactggggattagggtttcaatatgatgaatctggggggacaaaaacatgtactgcattacaaccagtgtgcacatgaatcatctggggaacttgatgaactctgggttcagattggcaggactggagtagggcctgagattctgcatttctgacatgcttcgaggtgatggagatgctgctagtccacaaaccacacttagagtagtaaaagaatagaccactgatttctgttcctggccaccaaatatttgccaaaaagtaagattctaactaagaccaccacagctgaaggatttaaattactaccataggcggcctctccctcctctcttttacttttttctcgttgtattttctcattaacaaagtttctgtcatgtacattggaatgcacttagcaacttgtataattgytggcagacagaacaccttgtaagccaaatgagagtttctcttcaataaaatcctaacatcataatttctcttttccacctctggtctcctggaaaacatttgtctcccattggcagcacccttctgttaaccggccatctggaggcagtcaggaaactgctagaacatgcttgctggcctaaagacattctcggctcaccaatgtgaagaggcaaacttaacacagcaagatgggatgtgtgtgtgtgtgtgtgtgtgtggagatgggtggcatggggggtttaaggagttggttcacattcacgcaattatgggggctggcaagtccaaaatctgcaaggtaggccatgagggtagggcaacaggctggacactcagaaaagagttaatgttgcaaccttaagtccaaaggaagcctggagacagaattccttcttctttggggaagatcagtcttcttctcttaaagctttcaactgattggatgaggcccactcacattatgacattatcaagagtaatctgctttactcaaagtctactgatataaaaatattaattgcatcttaaaaacaccttcacagcaacatctagactggtgatggaccaaactaccatggcctagccaaatagacayataaaattaactatcacaggatctaacaggagaattattttgcaacttgaaatctgacagagaataaagttgccaaacagaactcagatcttccatgcaggctgcaaaagtccctaacagtagaattccaggcctcttctagtactaagaaacatcttgacatttagatgttgactttttggcaagggtaattaacagtttcttaacaaagatggcctaatagaaacagttccagtctacagctcccagcgcgagtgatgcagaagatgggtgattctgcatttccaactgagctttgaagacagcagtggttctccaagcacggagtttgagatctgagaatggacagactgcctcctcaagtgggtccctgacccccgagcagcctaactgggagacacatcccagcaggggccgactgacacgtcatacagccgggtgcccctctgagacgaagcttccagaggaaggatcaggcagcaatatttgctgttctgcaatatttgctgttctgcagcctccgctggtgatacccagggaaacagggtctggagtggacctccagcaaactccaacagacctgcagctgagggtcctggttgttagaaggaaaactaacaaacagaaagaaatagcatcaacatcaacaaaaaggacatgcacaccaaaaccgcatctgtaggtcaccatcatcaaagatcaaaggtagataaaaccacaaagatggggagaaacgagagaagaaagtctgataattctaaaaaccagagcgcctcttctcctccaaaggatcgcatctcctcgccagcaactgaacaaagctggaaggagaatgactttgacgaattgacagaagtaggcttcagaagatcggtaataagaaacttctccaagctaaaggaggatgttcgaacccaggaagctaaaagccttgaaaaaagattagaagaatggataactagaataaacagtgtagagaagacattaaaaggcctgagggagatgaaaaccatggcacaagaactacgtgacgcatgcacaagcttcagtagccgattccatcaagtggaagagagggtatcagtggttgaagattaaatgagtgaaatgaagcaagaagagaagtttagagaaaaaagagtaaaaagaaatgaacaaagcctccaagaaacatgggactatgtgaaaagaccaaatctatgtttgattggtgtaactgaaagtgacggggagaatggaaccaagttggaaaacactctgcaggatattatccagaagaacttccccaacctagcaaggcaggccaacattcaaattaaagaaatacagagaacaccacaaagatactcctcaagaagagcaaccccaagacacataattgtcagattcaccaaagttgaaatgaaggaaaaaatgttaagggcagccagagagaaaggttgggttacccacaaagggaagcccatcagactaacagcagatctctcagcagaaactctacaagccagaagagagtgggggtcaatattcaacattcttaaagaatgttcaacctagaatttcatatccagccaaactaagcttcactaatgaaggagaaataaaatactttacagacaagcaaatgctgagagattttgtcactaccaggcctgccttacaagagctcctgaaggaagcactaaacatggaaaggaaaactggtaccatccactgcaaaaacatgccaaattgtaaagaccatcaatgctaggaagaaactgcatcaactagtgggcaaaataaccagctaacatcataatgacaggatcaaattcacacataacaatattaatcttaaatgtaaatgggctaaatgccccaattaaaagacacagactgscaaattggataaagagtcaagacccatcagtgtgctgtattcaggggacccatttcacattcagagacacacataggctcaaaataaagggatggaggaagatctactaagcaaatggaaaacaaaaaaaagcagcgattgcaatcttagtttctgataaaacagactttaaaccaacaaagatcaaaagagacaaagaaggccattacataatggtaaatggatcaattcaataagaagagctaactatcctaaatatatatacacccaatacaggagaacccagattaataaagcaagtccttagagacctacaaagagacttagactcccacacaataataatgggagactttaacaccccactgtcaacattaggcagaacaatgagacagaaagttaacaaggatatccaggaattgaactcagctctgcaccaagcagacctaatagacatctacagaactctccaccccaaatcaacagaatatacattcttctcagcaccacgttgcacttaytccaaaattgaccacatagttggaagtaaagcactcctcagcaaacgtaaaagaacagaaattataacaaactgtctctcagaccacagtgcaatcaaactagaactcaggattaagaaactcactcaaaaccacacaactacatggaaaccgaacaacctgctcctgggtaaataacaaaatgaaggcagaaataaagatgttctttgaaaccaatgagaacaaagacacaacataccagaatctctgggacacatttaaagcagtgtgtagagggaaatttaaagcactaaatgcccacaggagaaagcaggaaagatctaaaattgacaccttaacatcacaattaaaagaactagagaaacaagagcaaatacattcaaaagctagcagaaggcaagaaataactaagatcagagcagatctgaaggagmtagagacacaaaaaaaccttcaaaaaatcaatgaatccaagagctggttttttgaagagatcaacaaaatagatagatgctagcaagactaacaaagaagaaaagagagaagaatcaaatagacacaataaaaaatgataaaggggatatcaccaccaatcccacagaaatacaaactaccatcagaggatactataaacacctctatgcaaataaactagagaatataaaagaaatagataaattcctgtacatttacaccctcccaagactaaaccaggaagaagttgaatccctgaatagatcaataacaraccctgaaattgaggcaacagttaatagcctaccaaccaaaaaagtccaggaccagatggattcacagccaaattctaccagaggtacaaagmggagctggtaccattccttctgaaactattccaatcaatagatcaatagaaaaagagggaatcctccctaactcattttacaaggccaacatcatcctgataccaaagtctggcagaaacacaacaaaaaaagagaattttagaccaatattcctgatgaacatcaatacaaaaatcctcaataaaataccggcaaaccaaatccagcagcacatcaaaaaagcttatccaccacggtcacgttggcttcatccctgggatgcaaggctggttcaacatatgcaaatcaataaacataatccatcatataaacagaaccaaagacaaaaaccacatgattatctcttttctgcatcaacggatgcagaaaaagccttcaagaaagttcaacagcccttcatgctaaaaactctcaataagctaggtattgatgggacgtagctcaaaataataagagctatttatgacaaacccacagccaatatcatactgaatgggcaaaaactgaaagcattccctttgaaaactggcacaagacagggatgccttctctcaccactcctattcaacatagtgttggaagttctggccagggcaatcaggcaacagaaagaaataaagggtattcaattaggaaaagaggaagtcaaattgtccctgtttgcagacgacatgattgtatacttagaaaaccccatcgtctcagcccaaaatctccttaaactgataagcaacttcagcaaagtctcaggatagaaaatcaatgtgcaaaaatcacaagcattcttatacaccaataacagacaaacagagagccaaatcatgagtgaactcccattcacaattgcttcaaagagaataaaatacctaggaatccaacttacaagggatgtgtaggacctcttcatggagaactacaaaccactgctccacgaaataaaagaggacacaaacaaatggaagaacattccatgctcatggataggaagaatcaatatcgtgaaaatgtccatactgcccaaggtaatttatagattcaatgccatccccatcaagctaccaatgactttcttcacagaattggaaaaaactattttaaagttcatatggaaccaaaaaagagcccacattgctaagacaatcctaagccaaaagaacaaagctggaggcatcatgctaccagatttcaaactataatacaaggctacagtaaccaaaacagcatggtactggcaccaaaacagagatatagatcattggaacagaacagagccctcagaaataataacacatctacaatcatctgatctttgacaaacctgacaaaaacaagaaatggggaaaggattccctatttaataaatggtgctgggaaaactggctagccatatgtagaaagctgaaactggatcccttccttacaccttgtacaaaaattaatgcaagatggattaaagacctaaatgttagacctaaaaccataaaaaccctagaagaaaacctaggcattaccattcaggacataggcatgggcaaggacttcataactaaaacaccaaaagcaatggcaataaaagccaaaatagacaaatgggatcgaattaaactaaagagcttctgcacagcaaaagaaaccacgatcagagtgaacaggcaacctacagaatgggagaaaatttttgcaatctacccatctgacaaagggctaatatacagaatctacaaagaacttaaacaaatttacaagaaaaaatcaaacaaccccatcaaatgtgggcaaaggatatgaacagacacttctcaaaagaagacatttatgcagccaacagtcacatgaaaaaatgctcatcatcactggccatcagagaaatgcaaatcaaaaccacaatgaaataccatctcacaccagttagaatgttgatcattaaaaagtcaggaaacaacaggtactggagaggatgtggagaaataggaacactttttttttttcttgagatagagtctcactctttcacccaggctggagtgcacccaggctcggctcactgcaagctcagcctcctgggttcatgcyattctcctgcctcagcctccygagtagctgggactacaggtgcctgccaccgcgcccagctaattttttgtatttttagtagagatagcgtttcaccgtgttagccaggatggtctcgatctcctgacctcgtgatccacccgcctcrgcctcccaaagtgctgggattacagrcatgggccaccgtgcccagccaggaacacttttacactgttggtgggactgtaaactagttcaaccrttgtggaagacagtgtggcgattcctcaaggatctagaactagaaataccatttgacccagccatcccattactgggtatatactcaaaggattataaatcgtgctactattaagacacatgtgcgcatatgtttattgtggcactattcacaatagcaaagacttggaaccaacccaaatgtccatcaatgatagactggattaagaaaatgtggcacatatacaccatggaatactatgcagccataaaaaatgatgagttcatgtcctttgtagggacatggatgaagctggaaaccatcattcccagcaaactatcacaaggacagaaaaccaaccaccacatgttctcactcataggtgggaattgaacaatgagaacacttagacacagggtggggcctgtcgtggggtgaggggatgggggagggatagcattaggagaaatacctaatataaatgatgacttaatgggtgcagcttaatgggtgcagcacaccaacatggcacatgtatacatatgtaacaaacctgcacgttgtgcacatgtaccctagaacttaaagtataataaaaaaataaataaataaaacaatgcatgttaagggaatgatgcagtacctgtaatgttagccctctagtgatgcatatttttattgtttcttactttaatttttgcttgtgtgatagataaatgtgttattgtattcattttaattgaattttaaaaattaagagtgaacyctaacgattctaatatttttattagctgttttactttttgctctgtgacttgttaatatttggcttaggaccaaggtatttgtgcataaattttttaaatgttaaagctattaaacctttgttaagtttaaaaataaaaacagtttcttaacaaatagaaacttgcaactactatatcttacagcctatctggaaaagctctttatctctaagtattcatggtaaactgtctacaattttctggtagagttctcctcagtcattctcagaaaatcattgtcatcttcactttgtctgaagttttcaaacctatctggagagcctgactatttgggtgaagacactgatgcccaccatggacagaaccaggtaaccaggtcacgttacggtgtggtgcctgtacaaggcttcttttggtgaatgtgggtgctctgtgttatactgtaaccatagagaaagtgtcagcactaaggggctcagagattcattaaaatcattttccttacttatacgcagtgattccatggttatcctgtgacacagacaacacatcaataaaatcatcaatattctttaaaaaatgtttaaagcctaattcaggaaaaactgataagaaaactcccccagatctcataaaacagctaggaattacttccaaatttttgaaaagctaggtgtcttaggctgaattccccagaaaaagactcttgagatgagaatttttgtaaaagttatttatcagaaaggcagtatcaagtagaggtccacaaggcctaactttggcttaatcccccagagctctagagacaattaacagggaggtactggagtgtttatgctcttccatacattagtcattttgaaaagtctgcctcttgagggctgggggtgtgggagagaggtatatattcccaggcccttctggctgtctgagtatagacagacggagctctggcagcttgagagtagcccccacaaaaagagacacagctgggacacaaagcacaaggaaatggtaaagggatcaaacagggtatgaacaacctgatagcaactgctatactggagccttttttcctgacacttgattcctattctgctttctccagctctacctgtttgtggttcctctaatcagacaccctcctgctacatgcctccactgagaatgagtaatgaaagccaaggtggttacctgttctggattcaaaagtgcattccaacacttgttggctgtcaacactttggaccaacactttcatttcttatttaccatttaaatttcaatttgatctagccctatccatttgtgattttgcttttaccaaacccaaattccaaaaccaagtgaatctttagttcactttgcaccaagcccacccagctccagcatcttgccatacagaggttagtttcctaaggatggtgagtcttaccttcatccctatcgccagtccacttggcctcctgatctggactgggccttttatatatcatcttaaattgctcagccatggtgtytattgaactataactcatgtttagctgatcactttcccaaaaaattagcaccctcaatggagaaaatcttgaagtcacaaggttcaatgccctctccccatcaatattctgcttctgattctctcagagcactttgacggtcctcatgctgcaaacaatgaaaaagcccaaggcatgcctactgatttgcatcaaattattttcataaacagcaatgctaagtccttccactagaaaattaattttggcctatttaatgagtagggagaaatagatgtgttgtacatttgcattgtagtactatttatttaaaaaaaaaaacctcaaaccatttttcctctgctgtcccaccaagaaaacaatcaatacagaagacacctgtgaccaaatgtgtgggtgtttttcccacaaacaaacaagcaattactactgcaatggacaccagctgggtgttccctaattcaattctgactatctacaatatctatctatgacactggagatggtgtcagatctcacaggttgagagctcagtccccaagactgccccacttcaaacaccagtcacaaatccaggccttctgatcaactggctataaatcagcttctcacagccccctccttgggtttgattaatttgctagggtgactcacagaactcagggaaacactgatgtttactggtttattatacaggatatgacataggatacagataaagaaatgcatagggtaaggcatggaggaagtggcatggagcatccatgcccttcctgggtgtgccaccctctaggaccctccatgtgttcagccatccagaatctgggcaaactccatccttttgggttttttggagacttcattgcataggcatggtcaaagcatggataactgtgtcaaaatgtgattggacaaaaagagtaagatctaaacctagcaaagcctctttgttcagattccatttggcctctctatgcagcatctctttctccagggaatgaaacaggaccctctctagaatgaaggtcttatgactcacaatcagattagagttctattgtaggtgagagaaaggagggcaggggaaggtcagagaaagagattctgtttactgaaacaagggctatggaagttatgagctaggaaccatgggtgaaaactttatatatatatatatatatatatatatatatatatatatatatatatacacacacacacacacacacacatatatatatacacatatataatatacaaatatacatatatacatatatacatatatatatgaactttatgtgtactttatatatgtgtgtgtgtgtgtgtatcacaatatcaccgttttgaaaatttttgtttcagcggagctgaagccaagtttcttttttttttttattatactttaagttttagggtacatgtgcacaaagtgcaggtttgttacatatgtatacatatgccatgttggtgtgctgcacccattaacttgtcatttaacattaggtatatctcctaatgctatccctcccccctcccctcaccccacaacaggccccagtgtgtgatgttccccttcctgtgtccatgtgttctcattgttcaattcccatctatgagtgagaacatgcggtgtttggttttttgtccttgcgatagtttgctgagaatgatggtttccagcttcatccatgtccctacaaaggacatgaactcatcattttttatggctgcatagtattccatggtgtatatgtgccacattttcttaatccagtctatcattgatggacatttgggttgattccaagtgtttgctattgtgaatagtgccacaataaacatacaagtgcatgcgtctttatagtagcatgatgtataatcctttgggtatatacccaataatgggatcacggggtcaaatggtatttctagttctagatccctgaagaatcgccacactgccttccacaatggttgaactagtttacactcccaccaacagtgtaaaagtattcctatttctccacatcctctccagcacctgttgtttcctgactttttaatgattgccattctaactggtgtgaaatagtatctcattgtggttttgatttgcatttctctgatggccagtgatgatgaacattttttcatgtgtctgttggctgcgcaaatgtcttcgtttgagaagtgtctgttcatatcctttgctcactttttgagggggctgtttgatttttttctcgtaaatttgtttaagttctttgtagattctggatattagccctttgtcagatgggtagattgcaaaaattttctcccattctgtaggttgcctgttcactctgatggtagtttcttttgctgtgcagaagctctttagtttaattagatcccatttgtctattttggcttttgttgctattgcttttggtgtcttagatgccaggcttgccacctcgcagtttgatcttggactagcagtgaggaaggctccatgggcgtgggacctgctgagccaggtgctggatataatctcctggtgtgccgtttgctaagaccattgtaaaagtgcagtgtttaggtggcagtgtcccgattttcccagtacagtctgtcagggcttcccttggctaggaaagggaaatcctctgaccccatgcacttcccaggtgtggtgatgccctgccctgcttcagcttgccttccgtgggctgcacccactgtccagcccgtcccaatgagatgaaccaggcatctcagttggaaatgcagaaatcacctgtcttctgcgttgatcatgctgggacctgcaaaccagagctgttcctattccgccctcttggaatggacccttggctcacactaatcccagcactttgggagtccaaggtgggtggatcatgaggtcaggagatcgagaccatcctggctaacatggtgaaaccccgtctctactaaaaatacaaaaattagccaggtgtggttgtgcacacctacaatcccagctattcaggaggctgaggcagagaatcgcttgaatccggtgaggcagagattgcagcgagcagagattgtgccactgcgctccagcctgggcgacagaacgagactctgtctcaaaataaaataaaataaaataaaaatctgaatttacatttctcatgtgctgtaggatttcatgagaaattaacattaaattggtctggagtagttatacaggatgcctgccagaaagaaaaaaaaaatgactggagggacattcctacaacctgctgtttagcatttgctcagagaaaaatctccactcatgataaactctcaacctaaatttacttacacacttcaatgttgtggtgaacacataactttgcaaagtttgtagaggtatttctggatgataaactactacaagaaaatgctgggtaaaaggagaggcacatttctgtcagagagaacatttcccctagatatgtacagagtttgctctctcatttcctttgtttctactaaaatgatacctcccaaacaataccaaagaagtgcaatataataaatataaagcaaatacttgcaaaactactatataggtcgagaaacttaaaattaaccagtggcccaaatgcatcaccgacattccgatattccacatcccttcctatttgtaagcctgcttttcactctagaaataaccaatattttaacttttatggtaagcacgtccttgcttttctttatagtttcatatatatatatatatgaaagtatatatatatatagttatatatataattcctaaatgatatactctggcttatctggtttaatggttatgtaaaagaaattatatcttagggaatctttcatatcttgcttcttttagttatatcatgtctacaagatttatctatgttgttacagagagctgaggtccatttacttttattgctatagagcatcccattgtatgaatatgctataatttatttgttatgctattaataggcatttcattgtttctagaggctattactgcattcttgtatatgtctcctggtgcacatgttaccgaaacaccaggggttcggtctaggtcctgctgctcgcagcacagaaagccaatcactgagacaatgagtacaccaaggaagaaggctttaatcgggtgctgcagccaaaaagatgggagctcagcctcaattccatctccctggctcactaactctagggtttatatagcagggaagaaatgtaacaatgtgtaagaaagcaagaactacaggggggcttgaggcatctggtgagttttggttctttgatacttttttgagaggcctgatagtcctttcctgagaaagaaactcagataaaacaaagacaagtttcaagctttaagagcagaagggtcaatttctatgtttatcccaaaacaattgtctataggactgttgggctggtttcacacataagcatacatgtttctaaggaatacacccaggagtaaaattattgagtcatagggtatgcatctttattagaagatgccaagagctattttccaaagaagaggcatcaatttatactcccaccagtaatggaagcataatttgtctttgtagttccacatccttaacaacacttggtattatcaaacttttacatttttgtcctgagtggtacgtagtggtatctcagtgtggactttaattttcattaccttgatttactctatgaattacaggttggaagttactttctttcagtacacagaagatgtcaattacttatgcgtttctttattgctatttagattagcaattagtttccttgtcacttgtttgaaagtaatttattggtttttctctggattctttcaagaatctctacatctttggttgtctgaagttttaatatgatatatcaagctatagatttctgtattttgttactcggtattcttcagtctcttgaatctattgaatgatatccatcaattctggaaaattttcccctgttatttcctgaaatactgtttctctctgagacttcagttaagtgatattagatctcactgtgtttccccggtcttttgccctttcttctgtaattccctgtttttactctcagtattctaatgtattctcacctttctttcagttcattaatttctgctttagtggtatataagctttatgaaaactagtctagtctaatctactgaaatcttgctggcattacccagcctacattatcagaagtagaatgccactgtgttttataagatattatattttacttctatttgtagttttttgttcattttctaacttctcctccagaatgttatattccaagaggttagggacttaaaaaaaaaaagcattgtattctcaacacccagagagttctttacatatgatattttttaaaaaactgttgaataaaaatgttaatttttaaaaaagttgtaaaatatttcttcaaaactattatgcattttaccaacaatgtataaaagtcctgttttcccccacacttttgttaacattgtatattctgtcttgtaaatctttccagttttacaaaactgtgatatattatagttttatttttatttatttaataaggttgaatcaccttttattagccttttgtgagattcttcatgaaattggtaatttcctctgctcatttttctgttgggttttctttttttcctaatttaaaggggtaggtagaacatatattttatacattataacctgtatatattgtaagaattgcaaatgttttcttaatttgttatttctcatttgtcttttatctttattatgtcttttgctatatagaaattttgcggcaaggctaaatttcctcgttacctgtggctacaaggtttccaaaccaaaggctcagctctgctcatagcaggttaaatacgtaggggcaaaattatccaaaggcaccagggcactcagtgaggaacgtatccagcctatactggcttgtcctcatcccaaaaccctaaagcaactaaaagggctccttggcataacaggtttctgccgaatatggattcccaggtacggcgaaatagccagaacattatataattaaggaaactcagaaagccaatacccatttagtaagatggacacctgaggcagaagcagctttccaggctctaaagaaggccctaacccaagccccagcgttaagcttgccaacgggacaagacttttctttataagtcacagaaaaaacaggaatagctctaggagtccttacacaggtccgagggatgagcttgcaacccatggcatacctgagtaaggaaactgatgtagtggcaaagagttggccacattgtttacgggtattggcgacagtagcagtcttagtatctgaaaaagttaaaatgatacagggaagagatcttactgtgtggacatctcatgatgtgaatggcatactcactgctaaaggagacttgtggctgtcagacaactgtttacttaaatatcaggctctattacttgaaggtccagtgctgtgactgcgcacttgtgcaactcttaacccagccacatttcttccagacaatgaagaaaagatagaatgtaactgtcaacaagtaattgctcaaacctatgccacttgaagggaccttttagagggtcccttractgatcccgacctcagcttgtatactgatggaagttcctttgtagaaaaaggactttgaaaagcagggtatgcagtggtcagtgataatggaatacttgaaagtaaacccctcactccaggaactagtgctcagctggcaaaactaacagccctcactcgggcactagaattaggagaaggraaaaagggtaaatatatatacagactctaagtatgcttacctagtcctccatgcccatgcagcaatatggagagaaagggaattcctaatttcgagggaacacctatcaaacatcaggaagccattaggagattattattggctgtacagraacctgaagaggtggcagtcttacactgccatcatcatcagaaaggaaaggaaagggaaatagaagggaaccgccaagcagatattgaagtcaaaagagctgcaaggcaggaccctccattagaaatgcttatagaaggacccctagtatggggtaatccactccgggaaaccaagtcccagtactcagcaggaaaaatagaatagggaacctcacgaggacatacttccctcccctccagatggctagccaccagagaaggaaaaatattttgcctgcagctaaccaatagaaattacttaaaacccttcacctaaccttccacttaggcattgatagtacccatcagatggccaaattattatttactgggccaggccttttcaaaactatcaagcagatagtcagggcctgtgaagtgtcccaaagaaataatcccctgcacttcaggccatacatttcaatccctgtatctttaacctccttgttaagtttgtctcttccaraattgaagctctaaaactacaaattgttcttcaaatggagccccagacgcagtccatgactaagatctaccgcagacccctggaccggcctgctagcccatgctccgatgttaatgacatcgaaggcacccctccagaggaaatctcaactgcataacccccactacgccccaattcagcaggaagcagttagagcagtcatcggccatcctccccaacagcacttgggttttcctgttgagagggggtactcagagacaggactagctggatttcctaggctgactaagaatccctaagcctagctgggaaggtgactgcttctacctttaaacccggggcttgcaacttagctcacacctgaccaatcaggtaggaaagagagctcactaaaatggtaactaggctaaaacaggaggtaaagaaatagccaatcatctatcgcctgagaacacagtgggagggacaatgattgggttataaacccaggcattggagccagcaatggctaccatttttgggtcccctccctttgtatgggagctctgttttcactctatttcactctattaaatcttgcaacagcaaaaaaaaaaaaaaagaaaagaaaagaaaagaaattttgtggccaggcatggtgcctcacacctgtaatcccagcactttgggagggcggatcacaaggtcaagagttcgagaccagcctggccaatatggtgaaaccccatttctactaaaaatacaaaaattagcccagcgtggtggcaccacctgtagtcccagctactcaggaggctgaggcaggagaatcacttgaaccagggaagtggaggttgtagtgagccaagatcaygccactctactccagcttgtgtggcagagtgagacactgtctcaaaaaaaaaagaaaaaggaaaaagaaatttcgcatttttaaataggcaattctgtaagtcttttatgacttctgggtttatttcataattataaagaaattccttactccaagaatatgaagttattcttcaatatcttcttttattatttgtttcatatcttaaatatttaaatttttaattcactgaaatttatttttgtgtgtgttatacagtaagaatctattttttttccaaacaggcaatttttccaagactacttatttaaatatgtcttctttcttcactaaataaaacaatgcatttgtatatactaaactcatatttaggcaatgttctggattctttactttgctccattgatctgcttatcattgcatatctctggaaaatcttaaggactgctaatagagtatttgaaaagacatttaagagttttatatcacagtagaacctagatattgtactaataatcatttttcatattctatttaatatttatcataaataataataacttacaaaggactttcaatatattatcacatataatagtcaccaaacccacataaaatacgctcccattcattcattaagcaagtatttatcggacgcattttacaaataactaactgtactggttaatgggtataaaaattatcaaaattgacagagctcctacacttatgaaacttacataccaatagggtgtataaaaatttcttcaattttatatatatatatatatatatatatattctgaaatatatattctttatatatacaatttgtagacattatatgtaccacaactgacaaaggtgctataaaggaaaagaactgtttcagcatcaactcatggtacaactccggggaccaccttcacatcatctatggaggtccctgatgttgtgcagcacacagcaggcacaactgtatgcagtagccctgcgggtgctaatataagaataacacatgagatctaatttatatctgtgactcagggaaggattctctgcaaataggacctttaaactgaggcctgaaggatggataggcatgaactaggtacatggtgagggcatatgatgtggcttccaagacaaacagacatttcaaagatgggaaagatgtgggcacacccagagaacaatatggctggactatcaggagtgtagtgggcaatcattcttgttttcagtgcttaaactaagaaaatctcaggcaaactgggatggctggtcaccataacaggagtgagatggagtgtagtagcatggggtgaggttggaggaggggtggggaagagcaagcaggcaggggccttataggccacgtgaaagtttttctgttgtatatcctacacacaacagaaagctaatagaggtttcaagcaagcaatggcaaactctgctttacatttttaaaagatcactttggtaggcatgtagagaatgaactcgttgcgggcaggagactagctggaggcaaatgcagcacttgagatgagatgagggctcctcagcgttgggcaactggaggttcttaccacgctcattaccatgagcagcctggtaatagtacctcagaatccatgttatagatgacagtgttgaaacttgggaaagtttcagaacttgtctgacatcacacagccagtgtaggaaggctagattcaacctcagatcttttcactctgtatctcttgattcttactataccatgcagacttcttgctttatatttcctatataagaaaacaaacttgaaaagatgcattcagttgcatgatcggtaggatgacagtttcttagaaaaataaaaggggaaaatatattttgtatttaataaatgttgtagtttctcctaatcatttgttaaaactcaatttaaaacacaaagttcacagttaaaatgttgagataattatttaattataaaatataaatttataaaaacaatgtaaatagtgtacatattgtgtggcttcactcaaaaaatgaaaatgactattttgaacagtggggaagagaaacattatcaatgttgaagtaaggaaatattatgcatttctgactccaagttctgaatttataggatcctattgaaaacacctagaaaactctctaggatgtaataaatcttgacaatggaagaggtgcatatatatagaaatataaatttgggcccatcatactattgctgtacattcaactagaactgcatttattccaattgtacattaagtgtctttgtcaaatacacctaatttttcataagctattcgactaaaaataactatatatctttacaagagaaaattaaacaacaaaaggaatacattcatttaagaatataactgggaaaactgaaataaaactatacttgcaatttgtcaatgctgacatagagcaatccatctaaagatattctctgaaatccatgccactaggggcagaaaaacatttcactgtcaccatacctcccagtgtctgaaagttttatttccatgacgataaacctgcaaatcaacttgctgtaatgtgttgattgcatttgctgatactacagctttccaaggactatttttttgaaaagttgacaagtaacacaaaattatttatcaggcaattgcatcttatttgagattcttcagtgatgaaaaactgctgtgcctagtgaatgctggagccaggcatttggctgattcatttagaaactctcaaactcttgggagaaatatttaagtaaatgattgtacttcatcacacaattatccccataggaggccccccaacaatttcaagatcttgcacctacctacttagcacataaaatgatatctattaaagcataaaagtgcataatctcagtaagaatgtagaattttatgatcattacaataacactgaaaacattaattctgtttattaatgatttcacacccatgaaattcaaataaagtagggcttttaccttacataccctatttatgaaatggattcctattgcttcattattccttttccagtttattaaaattgtttaatagtgcagaacaaatggagaaattattcatgatatcctgtaatatttaatgctagctcttgcagtgtcattttatgcctagaatagaagttctcaaacagtggtccaggaacccctggaagtctctgagactcaggaagtccaaactctaayaataycaatatgttatttgcctttttcactcttgtcctatcattaatagacagttttccaaaggctatatggcatgtaatatcacaatagactaaatacaaagcagatatgagactaccactgccttctcttaggctagtcgctaaaaaaaaggtaaaaatgtaaactaacaccatttctttaaacaaattttttattttggaaaacatggttaactttcatgataagtatgcaatttatgttaatatgtatagatttattactgttatttttaagtgactatttttaaattctgttttactttctaatacggtatatatctatagatataaccatgtaaacaaaagctcttcagtgtcccaagcaatttttaagcrtgttaaggtgtcctggtgccaaaaagtttgaaagctgctaacctagagtttattcagtagctggggacaccagccgattaccacaccatcacactgttgtgcaaccatcaccaccatccctgtccagaactttttatcttcccaaatggaaactctgtaccatgaaacaataactccccattacttccttcccccaagaccctgacaaccacagttctactttctgtctctatgattttggctgctatacrtagctcattaaagcagaattatgcaatatttgtccccttgtgtctggcttattgcatgtagcataatgtcttcaaggttcattrcatggtggcatgtatcagaattttcttccttttcaaggctgaataatattccattgtatgtatgttatactttgtttatccattcatccatcaatggacatttgagttgttttcaccttttggctatggtgaatagtgctgctgtgaacatcggtatacaaatatctctttgagaccctgctttcaattttggagggtatataatcacatgtggaactgctggaaaatatggtaattccatgtttaattttttgacgaatcaccatactgttttatacagcagctacctcatcttaacattcccaccagcagtgcataagggttccaatttcaccacatgctggccaacatttgttattttgttttttgatagttgccattctaatgggtgtraagtcgtatctcattgtgatttttaaytgcattttcctagtgattagtgatatggagcatcattttatgtgcttattggccatctgtatatcttctttggagaaatttctattcaaatcttttgtccattttttaattgggctgtttgatttgttgttgttttcaagagttctttatatattctggatattaatcccttattggatatgtgctttgcaaatattctctcccgttctgtgggttgccactttactatgttgatactgttctttgatacataaaaatttctcattttgatgaaatccatgtttatgttttcttttgttgctggtacttttggtgtcatatcaataaattactstcatatccaatgtcatgagctttcttctatgtgtttttatagttttaggtttttgatctattttaattttaatttttggtatgaggtaagggtctagctttattcttttgcatgagatatccagtcttcctaatatcatttgttgaaaagactgtccttaactctctttttaaacattgtattttttttatcagaattcagagtatttgtagtaggcagaataataacccccaaacaatgttcacatcctaatccccagagtttttgaatatgttatcttacatggcaaagcagagttaagattgatagaattaagattgttaattagctgcctttaaaatagggagatcatcctggattacctgggtgggcccaatataattataagagtccttaaaaatagaagagggcacagcacagaagagggagaaccagagagatggcagcatcagaagggcttggtccagtgttgctagctttgaaaatagagaaaggagggcacaaaccaggaatgcaggagctctatgagctggaaacagcaaggtcactagagcctccagaaggaatgcaggccagtgacatcttgattttagcccagtgagaccaatcttggacttttaatctccagagctgtaagagagtccatttgcattgcttaagccactaagtttgtgattatttgttayagcggcaatgagaaatcaatacagtattattttttctaggtattaaatgtattttttgaaattatcaaagaaaaaactgaaactgagtagttgctgaactttagataattgttcctttaccacaagagatattagttaataacatacctctgtaaggataagaataataattataacaatgtgaagaggctgcagtcattgtatcttttattggctatgtgtttcacttttagatactattaattgatttcctgctgttaaagaagtctgtacactaaggcttttttccaactcacctttccatacctcccaattttggtgacatgttatttttatgttgttaaatgttgtaatatttacaataattatattttgttctgaaatcataatttctagagatcttttagtcttcagaattggaagattatcttctaattttaccctggattaagagattcaatgccccactaaactttttaccatagcgtattagtccacttgtatcactataattataaagaatacctgaggatgggtaatttataaagaaaagaggtttattttggctgagggttctgcaggctgtacagcaagtgttgtgccagcgtccacttctggtgagggcctcaggaagcttaaaatcatagcagaaggtgaagggggagtgggtgtcacatggtgagacaggaagcaacagaagggaacaagaagggggaagaagctacactcttttaaacaaccagatctcatctgaactcatcaagtgagaaatcactcattactttagggatgacattaagccattcatgagggatctgcctctatgatccaaatacctcccaccagcccaacctccaacatatttgtctgtttattttccatcgcccccagttgaatggaggctccatggaggcagggatttgtgtctgctttgttcactcctgaatcctcagtgcacaggacagtgccgggcacatgtgagtgctcgaacagtagtttttgagagcatgaataagttcatttgctgctaaagaatttttgcttctttaaaaaaataatttctagctcaagtttcccaaaatgactagcaaaataccttgaacttagcagtttctcagtaaatatttatggatctatacatcgatgtgtaaagttaaatacaatcacaaggctatatgtgattaaaaatagtagagatataaagtcttacggtaagtgagcaattagaaaaaacatttctgtttggactggttgtgaaatattctgtaagcctttaacaataatgaaaattagtaaaatagtagtaaaataattattaatcactacattccagcaacttctctaagtgcttttaaattcctcacagtaatgctatgacatcaatatcattgtgatttccatctaacagatgaggaaactgaggcacagaggtttatggcatttgacccaaatgccatagtgattggcaaagatagaattataacccagacagtctgcctaaataacctgttctcttgactgctatacaaaaatgagataaaagggtttatgtttttaaagtgaataaaggaaatggtttggttttaatgtttgtgtctcccctaaattgatatgttgaaacgtaatcaccaatgtgatgatattagaagttggagcctttgaggggtgatgagattgtgagaatggaggcttcatgaatgggattagtacccttataaaagatgcagtgagaagtcatcatctatgaaccagaaaataggcccttgccagacactgaatctgccaatgcattgatgttggatttcccagtctccagaatggtaataaataaatttctgttgtttataagccacctagtctatggtattttgttacaacagcctgaacagactaagacaagaagtgttttagtttcctaggcctgctgtaatgaagtcccacaaatttggtgacttaaaacaacagaaatttattctctcacaattctggaggtcagaagtccaaaatcagggcactggcagggttggttccttctggaagctctgaggaagaatctgttccaggcctcccctccttcctagcttctggtggctgttggcaatccttggtcttccttggcttgtaggtgcattactacaatctcttcacatcatcttctttgtattaatatatctctctatctgttttattttctcttctctgatgaggacttgtcactggattcagggcccactgtaatccagggtgatctcccccgaagatccttaccttaattttatctgcaaagatctttattccaaataaggtcaccttctgaggttccaagcagacatatcttttgggggtcataattcaactcactacaggaagtaatgaaacactttggggtagaggaaaacttcactgtaggctctatagggcagaaccaagtctgtcttgctcactactggattcccttttctcagcagaatggatgcctgataaatatttgttgaagattgactgttgatgaaagataaaagtggtgctcagggaatgcttyttctaaaggatatgaaaggcaattgcctaggagcaggaaaatcaattaggattgaaaagtgcaaggatataatggtacttacaaagtacaaggataacagcaatgtaaaattcctaaaagaagggactccagaattcctaaaaggaagcccagaaagaagaaaacaggtaaatttgaagagatttctacagagccacataagataaccacttttgaagctcaaagaggcaaactgccacttaagaaaataaagtttattatactaggttagtgcaaaagtaattgcggtttttgccattactttcaatggcaaaaattgaaattgcttttgcaccaatctaataataaatcttttagaggaaaaagaaataccactgactattttcttatcaccttaaaatcatamaatttaatcacaaaggagccaaaataaatggacattgtttaggccacacaagcactttggagacatgaactcacaaaatgcacttctatgtaccaggctatgtaagaaacagctcattacacaactacacacaagagacacactcacactatggcactccaggccagctctagtcccagtgtcaagcctctatctgcctgtgtacccttcattaactcagggtttgtttatttgctcctagatgtcactaatgactgttagctattttacctgaccatctctaattaaattgtattttctcttcagtcttgtaaaatcagctggtttgaacacttctgactcattaacatgatcaactggtttttaataaatgtaagctttgtctttcactgtgggaaggaattattattaggtaaactctgaaatactttattttcaatctgtgtgacttttggggctttcacttgctacactatggtctgaggcagcataatagtatcacagtgtttggtcctaatatgctctggaagtaggacttcaaccaaaacacctgtactcatttcttctatttagtggaaagctgtcacagcatagaagagaaacctctgaaaaaaaattgcagatggggctgggtccagtacaacaatatctccttcatcttttacctctttgcacttcagtgtccttctctatgaaaaaggagaagagttattgacacatgttgtcagtatttgagaatttcagtaaaccaatccctcattccaaggaagaactggaaaatgagggaaatagaatcttttgtgagttttaagttgaaatataagatcaacatttaatagtagttatagtgatttttgaaacaggtttcccaccagaatcacctgtggagctttttaaaaatttagatacttagattttactctggaacagtgctgcccaataagactttcttcgatgatgcaatgttctagaagtatgctgtccaacacagtatccactaaccacgtgtaattattaagcacttgaaatgtgactaatgtgactgaggaacagatttttaattgtatttaactttaattaatttaaagtaaccacatgtggctagtggatttcaaatcagacagcatacttctagacaaattgctttcagtgtgtgctcctcaaacgcacagcaccagaaacaagcacagacttttccttgtcttcaaaatctatgctatgaaaaaaaggcctgctgaaatttcttcatattccaactaaaggagaaaataatggaagtaattcaaagcaatttgtctaaaaccaggagttcacttatacatacagcctttgaggtagagtggataacaaatccctatgtatcaggaaaattacctgattttattataaacccaaagcagaggattacattaaaataagccacaagtattacctaaatatttccattgcaaaagtcatggttatgcctaccaagctctatattttaatctattgagtttggcctaaatctcaaatgagactacaatggaaaaatggatacatattctggtccttcttatgctccttagcacaaaatatatttacactcataatgtacttagagaaaatagatggaaattttaactgctagtgtatgggctctaaacggctggcaaaggagcgtcttctaaggaaagaactttgtcccaggttctacttctggatataacagtggtatccctgatgcaccaacaggagggcgcccatttagaaatgccttccttggcgtgaattaggtcatgaacagtttgctgcactctccctacattatcttgatacacatttgtagggccttggctctaattctgggggctgtctacagacctgacaaagatgataatttattttggtactaagttcactggcccagataggcatcattaagaccatcatttgatatgtagaactaatcagccaaagtgattttatatttttcataaacgcaaaaacaatagcaaataaaaatactgtattctaaattattcttaattcatatagtgaaggtgtttatgggctaaaattataaggtttcctggtgattaaagttgaaatactattgatcatcatttcaaaggttttatgtgaaacttgagaaaatattgcaacttgctttgacactgattgtactcctttagtaaaaaattgctgtgtactttctgtttcacgtgctgtgctcagctttgtgtatcatcttatttgttcctcactaaacccctgcaaaatgggtgtgattattcccattatacagatgagaaaactgaggcttgggaatattaaattttttgtccaggtccacatagttggtaaatgccataagtaaggaaaagacaaagtctggccccaaatctctttaaagtataccagtggccatcagtttagtggatttttctgaaatgtgtacgaatattccagaaattttagtcattcttactttgaacatattggaggtacagttactttaagtcagagaaaactactgaattatagactgttatcaaaatactcttttaccatctcaagcatatggaatggctcaaaggaaccactatctatgaatcatctgtggaagtctgcttctcaggtctttcaagaatttgatgattagctgccaagcatgcagtgaacccagcgcctcaaactgtaagatattggggatcagttgagcatttgagttggtgggggacagtagggaatagcatttctgtccaatatgggattcctctatgggaaatctttgaaccagtaaaagctggttcaaagccacccattgggctgaatgaggctgtctcagagctccagtgctgtctgagactcttcttgcccagtctgttttccttcctgcttgcctttcacaggtgtcagacctgcatcatagtctgaaggttctctgcctactcccaatctttctatcagttttctttcaacagactttaccctattacagmtcttatacttctaactctgtcctattatctgctttccagaggatccagtcaacacaaccactaaaaaaatattttcacgtaatggccctactaggcctgttattaaaaaatagtgattcaaccaatatttgctaacgttctgtcatatggaaagtgctgtcatgaattccatggggagactaactgatacaaacaaaagaaacaagtgtgcacctgtaatacagactatacttcatacaaccctttaattcccagtagttcttaggcaggacacatcccaaggagccttgggaggattactctggtgacccttctattaaaggatggctggccatttctattaaattaaatactattctatagttactgcagaagaacaaaccatatttttaaactgttggtgacttacctaaaatattatttaaatgtaggggtatccataaagaaagatgcaacagctaggggactcaaaaagtatgcatggaggattctatttccttatttcagaaattcctttatttttcatttttccagtattcgtctagtgaaattagattacagtctcctttaagaagaaagagaaaaattttatagatgaacagtgatgcacacaacttatcctctcctggcaacttgttattctactgcttccccaactgaattaatctctgcgtgaaatgtatgctgtttaagataaaaagcattcgtgttcttaataggatttttccctaggtttagtcattcattcagcaaatacttagcaacaccaactctgaactagttactgtataagtaggtaggaataaaatggtgagcaagacggacatggtccatactcttttgggtttagagtctagctcagtccttttcaaactttaatgtgcctacgaatcactgagatgttgttaaaaatgcatcttctgatctaggaagtctgaagtgagtccgagattctgcatttctaacaaattctcaggatgctactgattgtaatccacaggtcacactttgagtaacaaagaactagtttattgactctaagttgctgtggtatgatacattcctatactgtgagtacttcctytgacatttttgaatcaatgaatattgccaatataatggaaaatacatgtttttaccatgatgcctgctggatggaattttgagctgagagagcaatgattataggaatatgatttactgagagcaaaaagtaagaggcgaggcatcgaatgacatcatgatggcaccaaagaatcgtggagttcctagggacaggtaagaagatggcctctgcgattataaaaagtcgagaaacaacagatgctggcaaggctgtggggaaataggaatgcttttacactgttggtgggaatacaaattagtacaaccattgtggaagacagtgtggtgattcctcaaaggcctagaaccagaaataccatttgacccagcaatcccattaccagtatatacccaaaggaatataaatcattctgttataaagatacatgcacatgtatgtttattgcagcactattcacaatagcaaagacatggaatcaacccaaatgtccatcagtgatagactggataaagaaaatgtgatacatatacaccatggaatactatgcagccataaaaaggaatgaggtcatgtmctttgcagggacatagatggagctggaagccattatcctcagcaaactaacacaggaacagaaaaccaaacaccacatgttctcacttataagctggagctgagcaatgagaacacatggacacagggaggggaaaaacacacactggggcctgtcatggggccagggggagggagagaatcaggataaatagctaatgcatatggggttgaatacccaggtgatgggttgacaggtgccataaaccaccatggcacatgtttacttatgtaacaaacctgcacatcctgcacacatatcccagaactttaaattttatttaattttaaaaaaagaagttggcctgtgaacatgttagcatagtcagggcaatgacctactctcctcaaacatggcacagagctaaaggggccaagggaaacattttaaaattttttctaaaatctgctctttcttaatcggtagtcacctttcagccctctcaagtataccactaaaatttttcatttgggatgtcaaaaacacacaaaggttggtcctgttcaaaatgtataatctcacaaataaaaggagkctaaatttatttgactagacaccatatgctcataagcaactgcttatgcaaattgtcaaattattatatcttaaaatggatttgtgggaggtagagggtggaaggaaagaagcaggttaatttagctttatgctatttgaagccaagaaaacaggtcatgtggaattgagctggaagaagggttgagttttttcatttcttctagagtcaaaagagaaaatcaatctgagatataaaaaagggtaaagtctctttgatttctacaacccaaaatgcccaggcgccaatgcatgcaatgaaagactgcaggcatcttaaactcacctacaaatatttactttgccagctaatcttcaatagtaagaagaactcccattaataatttaaacgagccttggccagaaaaaaaattcagacaaatgaaggggttagcaggaaaggatcatcaaggttagctgtgaaggtaggtaggtatgtttatactacacattcatataaatatatccccacatgtggatgccagtgcacagaacaatgagatgggtttgcaagaaacccatcctgcaagatcagagacaagtctacctggtgagttataaatgctggcgacttcacatacttccctgaagacagaagtggaaaattgacgataaaggagagaataagtcaaattcattatactgctcacacttatacacactattatgaaatgcaacgatcattttggatctttttagtggtttcctatttttccttttttgagttttttagaagcaagagaaaaagagaagtcagttgaaaatgttgttactgatgagtgaaaaagatattaggttttgctgccatagttacttgccagaaagttcttttttcttttctttttttttttttctggagatgtgctatttcacttcaaaaaatgaaagagtttgacaggtgattctaggggatctctcacttacaacaattagtatctggtactgaggtggcccttaatgtcacaaaacaaaataggaagttcctttataaaaatcaaagaatattaattaaaatgcctatcataaatttctaaattaaagtctggcctaaacaccaaagcaagctatttcaatcacttcaacaaaaaaaactagcatatgaatcaaagatggtggttatttgactggaagcagacataatccaatatagctgtattagttttctatgtctactgtgacaaatgaccacaaattttgtgatttaacataacacaaagttatcttttctttttttttttttttttttttgaggcggagtctcgctctgtcgcccaggctgaagtgcagtggtgcgatctcagctcactgcaagttctgcctcctgagttcacgccattctcctgcctcagcctcccaagtagctgggactacaggcgcccgccaccacaccctgctaattttttgtatttttagtagagatggggtttcatcgtgttagccaggatggtctccatctcctgaccttgtgatctgcccgccttggcctcccaaagtgctgggattacaggcgtgagccattgygcccagccaacacaaagttatcttttagttctgtagatcagaagtctgacatggatctcaccaagctaagatacacttgttggcagggtgccttcctttctgggggatccaaggaggaagaatacatttccttcccttttctagcttctaaaggtcacctgctttccttggctcattgtctccttcctccatcttcaaagctagcaatgttgggccaattccttgtctcactgccatctctctggttctcccctgtctgcctccctcttctacttctaagaacccttgtggcactgagagcatccaaataatcagaataatctccctatctgattagcaaccttagttccatctgtaaccttaattcattcccctctgtcatgtaacttaacatattcacaggttccaaggattaggacagccttaggacatcaggattttaaggacatctttggagcccattcttcttcctacaatagtaactttcgttagctggcagaaatgaggagctaagaaagactgtaaatattgcccttacaaatataaccctgtcctccagcagttttagcaaggcttcatatggccccaatatagaattttacatattatagactgaattaagagattcaagaaccaacttaataaatgcctcacatatattgcacatttgaacacctctgaaatggagatgcatcttaaaatagacggcatatcataatttcatggacagtagtttyattaatgatatataatataatgattcatctcaaaattgatggtgtctttgattctgtaaagtacaatatgatatttctcaattgtattggtcaggctaggctacacttgctgctgtaacaaatacgcctgctgacctaggtaacaagggatttatagctcaytccttttttaattatattttgctttttaggtttaatcaggaaatttaaaactaaataaaatattgtttttgtcatcagttttatgatagaatatgaagaaataagcctattttataatagttcattttggtacaagtcaatatattattttgtaaaagaataaaggtatttgtttctctatctaattggaacataaatttcacatgattcaattatatatttgggttttgttcattaccctaatttcagagtcaggtaactaagatagactgttgtggtaagatcagtagtgttcacccatatctgattctctcctccttgggcacaggaaagactgtacttcccaggccctttgtggaaagttgggccacatgactagttttagtcaatgaaattgcaaggaagtaattttcaagctgaagaatttatgtgtgggtgtgctacttccaatctacttctgctgcttgtgggaacattgaaagccaaatgctgagatggtggtggtataaaatagaagaagccttggtccttagtcactgcacagggaatatctgccctgagagattctttcccacataggactttataggaatgagctataaatcccttgttacctaggtcaataggtgtatttgttacagcagcaagtgtagcctagcctgaccaatacaattgagaaatataatattgtactttacagaatcaaagacaccatcaattttgaaatgaatcattatattatatatcattaataaaactactgtccatgaaattatgatatgccrtctattttaagatgcatctccatttcagaggtgttcaaatgtgcaaaactgtgtattttagactggatgaaatatggtatatgtctaattgtaaggaaacctagaaaattttaagacttgactcattttccaataagaatatcaaacttgaatgttgaactattaggagtataagtcaaacagataaatttctatttataatacattgttaatttagtaacaaatttaaacttatgttcccatattatataaaatatttagagctactgcttttttcccactctgaaatttcatgaaatacaattatttaaactcctcacatgcatacagactaagtgtccttgtcatgactatgagttgtgcaactccttacttccagctcatatttttcagataaagctctccttgaaatctgcataggaaactgtcagtacaagttctgtccttttcttagcctatctgtgctattgtcacaaaataccacggactgggtaatttataargaacataaatttatttctcacagtcctggaggctgggaagtccaagatcaaggcaacagcaggttcggttgtgtggtaagggctgctccctgctgccaacatggcgtattattgcttgatcctctgcagtgaaggaacactgtgtcctcacatggtggaaggtagaagaacaagagggatgaactcactccatcaagccctttgataagggcacttaatcccattcataaggagggagtcctcatgagtgaattgcctcttaatgaccccacctcttaatactatcacactgccaacaactgagtttttgagagcagacattcaagccataacaatcttaaagtacaagtacagtcatgcactgcataatgacgtatcagtcaacaacgaaccacatatacagttgtggtcccataagataataattaaactaaaaaattcctattacctagtgacgcagtgtaaacacacatactgcactgtcagtcatataaaagtatagggcatacaagcatgtacaatataatcataattatgttactactttacatatttactatactatactattatcattattttatagtatactccttctacttatttaaaaaatgttaactgtaaaaccttcaggagatattccagaggaaggcattgttatcataggaggtgacagstccctgcatgttattgtccatggagatctcccagtgggacgagatatggaggtgaaaggcagaaggcctaggctaatatgtgtgttcgtgacttcgtttttaacaaagaattcaaaagttaaaagaattaatgttaaaaatagaaaatgcttatagaatgatataaaaaagaaaatattcttgtacagctgtacaatgtgtttgtgttttaagccaagtgttataaaataatcaaaaagttttaaaattaaattgtataaagtaaaaaagttacagtaagctgaggttaatttactgttgaagaaaaatattttcaaaataaatttagtatagcctaagtgttatatatacagtgcttatatataaagtctacagtagtaaacagtagtgaatatcctagaccttcacattcactcaccactcactcactgactcacccatggcaacttccagtcctgcaagctccattcataagtgccctatacaggtgtaccatcttttatattgtgtttttactgtctattttctgtgtttagatatacaaatacttaccactgtgttacaattgcctacaatatgcaggacagtaatatgctgtacaggtttgtagtgcaggagcaacaggctataccatggagcctagatgcgcattaggctataacatctaggtatgtgcaagtatactctctgatgtttgcttaaggatgaaattgcctaatgacacatttctcagaacatattcctgtcattaagcagtacatgactgtattcacgtgagtgatatttgaataggttttttgtatgttgttgttcatcctgtgtctgtaatttttataatataactacttactattctttttaaagtgctttccaaagacttgttaacaaagacatcccagtttttcaacctacgctagggcaacagtcaggttcacaacctcagtactgtaaggcagcataggatatgttctaagaaaggagaaaaatgatcagggagattagtcaaagagtcctggtaggagacatcttctsacgtcgaatcaaggaggacgtctttgagctgggtcttaaaagataagtccgattctaacaagtagacaagaggtgataagcaccatctaaccattctatatctgttttggtagtaatagctcctgtcactgattgagcgaaatacagtaacagacatgtatgttactgtatgttaacatatgtgttatatcaaatacatgttgtctcacttaatacagtaaatttttcagattggtattactaactgcattttattgatgaaaaacaaatttgaaaactgcagatgacagaaattatgttccttaaaatcacagtgcaatcacatgggaaagtcaggactcaaaggcagatctgaaagattccctttcatatggcagcttagctttctttggccatcataacaatgttctccaagtggtaagcacataagtatggagcacaactgtgaaacctgcatgcatggaaaataaattcatcaactaaaggaaaaccatacsgtggtatatgcagagcactgtctgaaacacacattctataaggttttactctattacatttgtttctatccaaccttaaagctatgattgatacttatttaattttctgcttaattgatttgttccaaatctgagccatgatgacccaagcaaggccacttaaggatgccctctgccttattagcatgacctttagtataataactactatatgatttatatttagctaagtgatgatccatgggatgacatatagccttcccaggcggtttacttattttgagatgtccgtgggtgctggttttccccatgaatacctgacgttctgggactaattttccccctatttatattacgtttgcttaggatgccatgtcaaagtggcttgttgggcaggtgttrgacagcacccagcttaatttttcaaattggatataatctttgaaattttagttagtgacttgtcgtacagaaggaacactctaaattattaaatatgcctcagggtggagaatcagcacatcttcattcagtattagattcattctaattatcctctagaactcagaaattagtgagaactgcaggcatctttattcctgagagcaagtattagagtcaggtggaaacactattatgaaatgcaaatgtaactcagtggaataagtgacaattatgaaataaaaccaccatcaatttatctttataaatcaagtcttgaagacatctaaagctccagaagtgacggaagatctaggaatgtggaagtaacccctggcatttgtttggtcttcttttctgagaactaaagagccaggcagctccaccagcttctccatcttgggctgggcattggagtctgagctatcaccttttgttgtattatgctccagtggccttagtgagcactaggtccttttagatctgctggtagggctctctgctactcagatgtgtgcacctccacccccaactataaagactgaagagagaggagctaaaagatccctgtcccttatctccaaatagccaactttcctccttggaaaggaccccaaagctttgttaacactccttgtggaagacaacgttgttcagctgatgctagaagaaagtctcaaaccctgtgatcaccttctggattaaggagtttgtgtcccaggtgatacccaaagatcttcccaattgttttctatctccatgacttcactcacatcgttcttggccattcattagctaacacatagacagctaagcattacattgtttcttctgaatattttaatatttttttaatttatcaattttatttaggtataatttatatacaataaaatgcactaatttaaagtattgagtccaatgagttttgacaaatttacacatctgggtagccatcaccacaatcaagatagcaaacttacaaacttttctatcacaaaaaaaggtttccatgtgcccttttagagtcaactcccaccactaccacccccaggcaaccactggcctaatttctattactatagataagtacttctggttccagaactcatagaaatggaatcattcagtatgaactcttttacgtgtggcttctttcacttcacataattttaaaagtatttatctatattgttgtatatattggtgtgtgttccttttcagtgtcaaagagtatatattccatcaacaaactacaaatttgcttatcctttcacctattgatggacacttgacttgttttttattttgagtacttatgaataaaacttctagaaacatttgtgaacaggtcttcttgtagatgcattttcagataactatctaaaagtggaattactgagtgagtaaaggttttctttcagataactatctaaaagtggaattagtgagtgagtagaggttttctttttaaaattaaaacaataaaaacataacatatttaattagcaaagttcaaatcactttatttccacttggacatttaaaaagaagaggtgatatcgtaagtcatagacagcccagaactgtaaagggcatgtggggctcctacaggcaagcaaagcacaaccacctacaggtctgagctatctctgagcattgggctcagtgattgcttaaagagtggctgaacaggaaatgaagaggtgacagctggtcaggatgtgggtaagcagccaaggcctacttcactgcattctccacatctgaatggtggggtagggagtcatgctccttgtagacccaggccctagagtctcaggctattccagctttggaaaaaacactgctctgaaagtcagctgtgagttgctaaaaaataaaatataaaacaaatgctagagtacaaagaagttcctggcaaaaattaatgtgcaagatatcattagcattacatataagaagttaaatggggataatttctttaacattccagttgtactttctcatttggttataatggttacccatgactttcactagattaaatcagctatagtcaactaatgcatatcaaatgtaaataataagtcttatcctgtctttcttctctgcaactaactcctcatatgccagagggaattgtccaattcaacctcaaagactaattaaatgtttggtgtaggagctttgaaagaatgactgtataattttattttacatatacatgccaaataaaaaataaatacaaatttcctttgggtgctgaaagtttgcagtctaatcttctaaaaggcaaaaaataattaaccacttcagagttcatcaacaaattaagtctcatgtttcaaaatttcacttcaattaatctctgtgatcactaattttctggtagttgcccaccattctaatgatttgtcaaacccaaaggttgcattttctttttttcttctttttttacttttattttaggttcattatagcactattcacaatagcaaagacatagaattgacctaaatgcctatcaaggctgtattttcatagttctaagtttattttttgaatttaatattaagaaagaatagcatttagaaggtatgaatttacagacaggaaaaaataacggaaatgtttaaagtattttacaaggcatctgatccacctaaaactattatgtattttttctaatctgatagtttatcatagaggcctaaatagtgtttacattacaacatgaacaaagtggtcaaagaagtagatttgacgatttccagtctggctggtaaatcaacacactgtctaccatactgaaacctccatgacaaaagacaaaatgagaggtaagaaggacatagcttgggttttccatagtagctggaacctgtggtcaaggctagcttgggagtaatttggctataacagttcacaaaaattagcaaagagacacatgacaaagactctgccttttgaaagtccagttcctttgacatgtttttctgtttcttacaagtcaattgcttctacctaccaccaccgaaaacacacactttgggggaaatggaaagggtggtatactagatagaaagcaggaactctgtggtccttaagcaaaccacttaatgtctttggcttctcatctatgaaatgcagtattaagtacttttcctatttgaaaccaggaagaagctcagactttttggtcctagaccacccattcaatatcctgtcctggggcttcctatgcataaatagtgatggctctgtcctccagcagagcacaagccacaggtattgggagctacatattgcctaactttctcagctttctgtcactggaaaagggtccgatccagaccccaagagagggttcttggacctcgcacaagaaataattcagggcaagttcatagagaaaagtggaggcaagtttattaagaaagtaaagaaacaaaagagtgattactccatgagcagagcagtggcatgagctgctcgactgaatagacttatagttgttttttgattatatgctaaacaacaggtggattattcatgagttttccaggaaaggggtgggaaactcccagaactgaggattcatcctacttttagaccatataaggtaacttcccatgtcatcatggcatgtgtaaactgtcacggtgctggtgggagtgtcttttagcatgctaatgcattataatttacatataatgagcaatgaggatgaccagaggtcactttctttgccatcttgggtttggtggactttggctggcttctttactacaacctgttttatcagcaaggtctttgtgacctgtatcttgtgctggtctcctgtctcaccctgtgacaaagaatgccttaacctcctgggaatgcagcccagtagttctcagccttattttactcagctcttattcaagatggagtcgctctggttctaatgtctctgacatttctatttttagaaagagaagtccatgggatatttctatacttccaaatttcacttttggaaattaacaaataatatatcaaataccataaaaggcctaagacagaaatccatctgaaatatatatttgtttgtcaagaatgtctgttacaagatggcttccatagcaccattttaaaagctggctaatgccaatctaaagagcttcaggtgcttgtctccatacagctgaaggaggcagcacaggctttaacagctctagtaagaagacttcaagtgcaaatctggtgagaagacaagataatccaaggttcactaccttaattctcaatttgagaagacagctaaactgctgccaaaaagagctgttacatcattgtgcagccataaggatgcacttgcagacctccaacaacacagagtgcaactggcccaggatcccagctgctatgctctgaaatccatctctgcattctctcagaggctatgatgcctcccgatgggctactactggagcacagaaggaatacaaaggcaggcctgtaggatggctgactttgctagaggacttcctgatgcctttgctacctctaactgcagaggaatctagttcaccttcaccaaacctctcttttcacttggaataagactttaatcagtggtctaatggttcccctggttttttctagctctttcctattttcttttatataagcattttctctaaaagtaacgttgcaattgtagtctagtcttagcatctgcttctcagaggatcagactaacattcactcatgtattcatccactcattaattcactcaagaaatatttattgagtgcttagcatgttcctggaaatttgctctaggcactggggagactgrtgaacaagactgagaagacacctatattgataaccctcctctgctcaaagtgtcataactgcttccccttctttagcacttactgtgtgctgggcactgaactaagaccactccacatgccacgtctcatttgctattcacaacaaccctgaaagaaggcattattattcttatttcatagataagaaaactgagacctagagagattatgttgtcagggccttctctgatagggccaacttttttactccaaaactcatgcatttaaccattagcttatgatgtacctactccatttgcatgtatctgctccatttggaccactaattaaagtcttattccaagtgaaaatagaggtttactggaagtgtactcgtttgctgtgtggtctgaggtagcaaaggcatcaggaagtcctctagcaaagtcagccatcctacaggcctccctttgtattcctgctctgagcacttttattttctggtaatgcacatctgcatagctgattttccaaagcctggcttcatttcttcaatttaaatttatgacaactggaagaaccatttacagaacagggaagacacagtgctccagagtattcggagtttgcacaattccaaagtcagcttaacgacaacagtgtttaacccacccagaagaggtctctcaccaggtgtgagtttccaactcatcctcactattgcaaagaagatagagaggacagaaaaatccttggcttctctacttttcatcctggtcatagcccagccctggtaaactgataatagctgcacacactcagagcttctcccagaggccagacagacccactgcaaagtcggccacagcaacctgtgcagcagctgtgagcatccttctgaaaatcaatgcaaacacataccatggtatccaaggtcagatgtggcatcctctacaattgattcaagttcgtggaggtccatggaaggaataggctgagactcaggcaggttctctaaagttggttcatcagattccttgtggaaggtaattaacaattcatgagatgctgatagaaggaaacagcactaccacaaatgaaaaaaatattcttatttagaagactacttggaaacaagcctacctaatcctctcccttaaacgttttcaaacttcaggaggtaaggtgggataagagaaacagccctgaatcaatgagacaggtgaccttgcacaaagcatttaaccttcatgggctcagtttcaggatcatgactagataagccaagtgggatgcccaaggtaccaattgaaggtactcactccattgacagctgaggggggccttcttcaatttggcacctatggtgttccacttaccacaccctactccagccctgctcagtttctgcatctcaaaattaaaggtgttagcctgaatgacttacaagttcccctctagctttaaagctctgtgattctatgaattccaatttcctaaaagaaaaagatctaagagaccacatgatgaaagaattcacacttcaaaaaaataaaaggtttagccaaaatcaataggtatttcaagaaatcattttgcctttttcccttagttttgtgtgtgtgtgtgtatttgtgtttgaacctggagctggtgctgagttgatctatttttcttgataaatggttttcatgggaaactactccaagagtgtctttttaataaaagaaaatttaaaagaaagttcaaactaatcttaataagtaaaatgaagccatgccacactgcagtgcggtatttgtgagaatatcatcataaagtgtttttaagaagtcagttttctgtaccgcataataattgtttcaggaggcgaaattggttccagatttcaaaggatcactgagagcacacagagaactttacagataaagaacagagagtacatgaaatacgtctttacgtgcacttcagaaattatttgaaaataagtatgtatttggactctcaattaactttgatttgctgagtttctctttgaagagaaagatagaattgttataattgcttctcttagaaagagaaggacatggtctgatctttgatccccattacctctccacgtatggagacctgatctgctatgtacttttcacagagacctaactttagccccagcaaaactgtatatgccacaggatcaaagacagacctggcctgtcttatgtattatggtatccaactgttttaagctgtgattctttagagaaacagtgcctaacatgattccacattcgatggtgcttcaagatttcaaagcccaaattcagccaagcagaaaatgcctgctaaaataaaaggccttgtcagctagggtctgaaaaacaaagcaagccactctctctacatgcctcaaataatttttataacatgtttgagaggcgacatagagcccattctctcccataactctgattctctcctgtaagtgcttttgaaatataaagtagcttgcttccaccaggcaagagagatgcaaaaaggaatagagaacagagccccaatgagattagcaagaaattaaatcataaacatgtatatgggcaagggggaggaaagcactcaaagatgggagcagtytcctcttcctcttctccttatcacatttttctttagcctcttgcatctgattaatctaatttctttcctatatttatttcatctttttcagctcaatgaagctttttcctgctacatttaaaacmcttcaggctcctctgcaaagtgttcggcttcccattttctttcccctttgttctctggatatcattaaacctgcctcacttttgtgcttgtgaatatgattaaacttgcctcttccctgccttgccacctctcttcatcctcgtcctggggtgaacaagaaagtcttccctcaggttgctcctccttttcttccattccttttaaatgtgttttttcctaaagagattatgacaaagtctgttcagcagtggttttccaagtctttcttcatctagaggtgaagtgctgctttcaggaggcccattttctattcattattaatcaaggtatacataggaaacagaccagcagcataggaattagcagagggattataagaaatgcaacrtcggccgggcgcggtggctcacgcctgtaatcccagcactttgggaggccgaggcgggcggatcacgaggtcaggagatcgagaccatcctggctaaaacggtgaaaccccgtctctactaaaaatacaaaaaattagccgggcgtagtggcgggcgcctgtagtcccagctacttgggaggctgaggcaggagaatggcgtgaacccgggaggcggagcttgcagtgagccgagatcccgccactgcactccagcctgggcgacagagcgagactccgtctcaaaaaaaaawaaataaataaaaataaaaaaaaaaagaaatgcaacatctcaggctgcaccctggactaattgaatcagaatctgcatcttaacaagattcataggcaatcaaggtgcatttcaagtttgagaatactataagccataagaatttggaggagggtccattgattgtggacccaagtgggctgacaaggttttcctgaaaacaattgaaagagagatgggatgctgacaatgtgccagagggaaatgactgatgtgactgcacaaaagagggcaggatgcctggcgatgctgagccatccagtctgtgggcctgaaccagctggcaagaggacacagtgttcaaacagaacagactcaacagccatctatctgcctggagcatttctgcccccatcaatatataaacataggaaacatgcttctggaaagctcagggccaaagacagtggtggcactaatctcagaagatcaaagaataaaccacagtctttgtccagaacagcatcagcatcggtcgcttcccctcctgctccctttgctccttgctgatgggaaggggatgaaaatgggaagtcactggggaagtgatgagttgggagttcataggatccttgtgaaatcctctctttcttcatctgagttgggccaagatcagaactttgtgtctagctcccatgttctgtggagtaatatatgcataagaacattttttgggatgctgcctgccatatggtctcaggcttatcttcagttacttcagggcccccaaaggaccttgatttataagaggaagacaagacctcatagagtatagttataacaccaataataattccatccaataaaaaagaacacaaacatggtgatcttgaagggtcaaagaagaaaagcaaaaaaggtaagtaaattatcagacactaatatttaagctcatacttgaaactacatttcttttttgccatatggtaacttcaagaatgaagtcatttagattttaaagaacaaaataataccatgcctgtacttctcaattttcaatcttagggggaaaatcccttagaatcagtgatccctgatttataagaggaagacaagaccctgaagagattatgacaaggtctgctgagcagtggttttccaagtcttccctcatctgaggtgaagtactgctttcaggaggcccattttctattcattattaatcagagtgtacataggaatcagaccagcagcatatgaattagcagaggacttataagaaatacaacatctctgagcattctagaaaagtatgtccccatttctatagctgaataaacaagtactttacacattaacaaactcggaattcttataattctgtcagcctccttgtcaggatttgtgggaatgtgcagttctcagcactgcagggggacaaagcagactgcaccagagaagaagagccaccttaacaggctatcatttgcagggcctagaagtgtgtgggaagctgaagaaatgcacccagttttcagagggggcttgagtccttccatagtggtggcatcaagacctttctccaactagggatccagccctattgttgaccccatggcctttcagtcagcaggttcttcactcgccaagttccctgagcaggaaagaacccatctcccaattctctgtagcctgcaacagatcccacagggggccttcacttaaatggtgtgtcagaggggtgggaaaagggggatggaattgagcacatattaccatcatccccacattgtctgctaactggtccatcaaacagaggaagactcctgaaattagaggaagctaggcctcttattggtccccacttgggatttttagaactccaaagcacacagaacccctaaataattgagaaagatgcattactggcagatctcccccttaaagaggggccctgtctggctgagggtgaggtctcctgcatgccccagggcttggagccatctgataactaagctacaacagaattagcatccctggggcttgggggattgtccccacagcctcagggagcttggtgcttcctgctaaaggagagaatctctcacatgcagggatctccgtgaataaaaatcagaatttgagacagtagaagttctctataaaaatggcttcatcccaagttgcttttacctgaagtgctatgaggttggtattgatgtctattgcccaaatttgacgttgtaaagaccaccttattaatcagagcctacccaaggcctgtggagatattgtcaaccattagagaaaatggtgtttgctatttacagatttggaatgccgaggacatgaatttggggtcatttcatgtgaatctgcaactctattcattattgaacatctatgacagttaaaatttgaatgaaattattaacacaatgtacaacaaaatgggtaggaaacaaaataaaaaggaaaagaataaaaaccagacaaagagaacaatgtactaaagaggtaaagcaacaatagcatgggtggaattaaaaattagatatacacacatttgttctgtcagctaatcattttaacccatcagttatgcattcagtgccaattcagttgtcttgtacagagtaggagcttgatttttgttaaatggatcaattgatccacctctcgctacagccgctttgaatcgttgtcaccagctgttgacctacattctagaatccttcctggaattgggtgaagttaatctggatgttcttgttttctcccttgtcccttttcctacccaatcatcgccawgaatctaaagcaagaaaaatttttatgtaaaatttaaaataagagggtacttacatggagtacatcaacactcagctgctgaaagttccgagatctcaattcttgcattcgtttgctattttcttcatatttttcttccacaatctttctgtaaatttaaagtgaatgtagaaaaataactgcgaattgctaaaaccatgtctatattatacagatgagtgtgatccttatttcaacagactgactggnggattagaaagccaggccatcaggtctcttcctcatcaaggtgaatgtggtgcagcacccggctgattctcttttaaagcacacacaagatactctggttccttattcacccttacaaatcccaaaatgcagcagcaggagaaggcagtgctcctctctgtgagttctccaagtgcaatgacagggctatgtgttcccaatgcctagcacagtgcctaacacatactaataacacaaaaactgctttcaggatgaacaaacccataaaaagtaaaactagagctacatatcaaaggatttatgaggaaatatctgggagtcattgcgcaggggaatttttctagacacatttactttgttttctctattacaggagagtgagtttaagcgacctgctactaaactggaagaaagatttgagttcttatgattacttgtgggctaatttatactcaggttttcatcactgaacacccttctagtcaaactcccttgtctctaaaacgggtacattataattcttctgacaatagagtcattttctagctaaaacacatgatcccccttgattctataatcaacaactagaaacaattccaatacaacttattcacaaaatcaagaccaaactttatttaaaaccattactttcaaataagaaaaatatattagtgtatcatgtgaaagatatgtgacttctttgtattaaaaaacagttttaatgtattttgtaatctgtatatgttattaaatttgcctttttaatctgttcctatcagagatttaattttccttttacccccagccaatgacacgaatcatggcaccttggaaatatcaccatttctgaggtattacgaacagatttggggctgtgagctgatgcaatggctcaagcaatttatgtgaatatattttcccagtaaaactcacactcaatgtcatagtggtttgcagaatccaacttgtattggctcaagagcagattgtgtaaatatcttcccaactgaatattaaatggtatcatattgttagcttgatattggccacagtggaagtatttatatcacagaaatcagcaaacaaataagcagtccccttcaaacccagagctggttgttaaatayttaccagcacaccactgctcacaatgtactttcatggaaatctttctctaccaatttattaaagaaagcaaatgttacgggaaaatagactcatagattcttacttggcttatcrtgatattcattctaagtacaaggacacctctaaatcattttttggataaattaacaagggaacaaaatgcgtagatttgtgttcaggttctttctgtctctctagttcttgattggggctcctaaactaccaaaatattggcagaggaagaaaaaataagaaaaatttggaaatttgataacctaccaacacataaatcagtctttcagaaattgaggctctaagcctctttgaaattccatttttatacatgtattttttcagctttattaaaatttaattgacaaaaaatgtttagatttatatatactgtgtgatgtttttatatatgtatacattgtgggataattaaatcaagctctactctgttagcaattttcaaaaatacaaaacattgttattaattacagtcaccatgctgtacaatagatctccagaacttatttctcctgtctgaaactttttaccttttgacaacatttccccattcatgcccccctgcccctagtaaccccattctactctccccttttgtgaatttaactttttaagattccatatataagtgatatcatgcagtatttgtctttctatgcctggcttatttctcttaacataatgtcctccaggttcatccatgttgttgcaaatgatgggattcccttcttttttaaggctaaatagtactccattgtgtgtatttataccacattttatttatccccttatctgttgatggatacgtaggttgagtccatatctcggctactgtgaataattctgcaatgaacattggagtataagtatcttttctatatactgatttcattttctttggatataagtccaaatgtaggattgccagatcatatggtagttctattttttaatgtttagaggaatcttcatgctatttttccataatggctgtactgatttacattctcaccactactgcacaagggttcccttttctctacatcctggctaacacctgaaatttcactttttcatgtaaatactstaattactagtgatatctcccaccagcaacatcgccctgagcatagacttttctaaatgcttcacttgacagaacagagctctgtttccagtctacttcttccaaaagctaacaatttcctgccaataaagtctccttcctataaataagtgaggtctcctggtagaaggtacgcagcaagcacctagggaatccgggtgaaacagtgatgtctcctgctggggtatgtgcagaagctgtcaacaacaatgagatttcgtttggaaactgaccctattttcatcactaataacctcccaaatagttaatctttcccttcacacaagactgaaagcctgatattaatagcacctgacattcaatctatggctcaataatcatcttggagtgaacaagtgaatgaataaacacataaatacataatcgtatgcattggggtttcctgttttggtttttgcttttctctgtaaattccctgagagccctgagaagtrgtcccgagcatgagtgcctaaaggaaaagcagcttacttcagcttcctggctttctcatcagccgcctggagcttcctcagccgcatcctttctcttggcrtcrttttctgtacttctgacagtgccctcagagtctgcaggtggatccttttttgcctataaataacaaagattcccctcatatagcccatcccaaacatgttcagaaaaattaaacaaatattttataaaagtatcactacactactgagagcaaaagcatcttgagacaggccaggcaaaaactaataagctttgggtatgtaatgagccaaccaggactgtagttaataagcaacayttttcaaattagatttttgtttaaaggaaattatttactttccaaattcctgctcatttcatcgccaatgactagttttcataatgtaaaacaaattaggatcttggccattaaagagtaaatagactggcccagtaattccaccatgtggataaaacacataatctttagagttaggcagggttcgaatcccacctccaccactcattagctctgtggccttgggcaagtaactgaacctccctgaatctcagttttctcatctgtaaagaatgggctacagtaagtatcatatgagataacatatgcacagtgcctagcacataaaaagtattccaaaatgctagtattttaatagctaaatcttatttttttattttttaacttttatttaaagttcagggatgcatgtgcaggtttgttatataggtaaactcaagtgataggggtttgttgtacagattattttgtcacccacgtattaagcctagtacccattagttatttttcctgatcctctccctcctcccaccctccaccctctgaaaaattccagtgtctgttgttcccctctatgtgtccatgtgttctcatcatttagctcccacttataagtgagaacatgcattatttggttttctggtcatgcattactttgctaaggataatggcctccagctctgtctatgttgctgcaaaggacatgatcttgttatttttatggctgtgtagtatcccatggtgtaaatgtaccacattttctttatctagtgtaccatggatgggcatttaggttgattccatgtctttgctattgtgaacaatgctgcaatgaacatatgcgtgcatgtgtctttatgatagaatgatttatattcctttaggtatatatccagtaatggaattgctgggtcaaatggtattctatttttaggtctttaaggaatcgccacactgttttccacaatggttgaactaatttacacttccaccaatggtgtatgagtgttcctttttctctgcaacctcacaagcatctattttttgactttttttttctttttttttttttttgagatggagtcttgctctgttgccaggctgcagtgcggtggcrcgatttcggctcactccaacctcagcctcctgagtagctgggactacaggcacacgctaccacgcccagctaatttttgtctttttagtagagacggggtttcaccgtgttggccaggatggtctcgatctcttgacctcatgatccaccattctgactggtgtaaagctttctgagaacttgccctatgaatctgggtgctcctgtattgggtgcatgtatatttcggatagttagatcttcttgttgaattgaaccctttactattatgtaatgctcttctttgtttttgattattgttggtataaagtctgtttggtttgaaattagaayagcaacccctgctttttcctattttccatttgcttggtagatttttctccatccttcactttgagcctatgtgtgccattgtatgtgagatgggtctcaaagacagcatatagttgggccttgcttctttatccaactcgacactgtgccttttaattgtggcatttcgtctgtttacattcaagattaggattgatctgtgtggatttaatcctgtcatcatgatgttatctggttattatgcagacttgtttgtatggttgctctatagtgtcacttagagtctgtgtacttcagtgtgtaccagtagtggctggtaatggtctttcctttctatatttagtgcttccttcaggaggtcttataaggcaggtctggtagtaacaattccctcagtatttgcttgtctgaaaaggatcttatttctccttcgcttatgaagcttattttggcaagatatgaaattctkggttrgaatttcttttctttaagaatgttgaatgttggcccccaatctcttctggcttgtaaggtttcagctgagacatctgctgttagtttgatgggcttccctttgtatgtgacctgacctttctctccaactgcctttaaaattttttctttcattttgaccttggaaaacctcacgattatgtgtcctgggggatgatcttcttgtgaagtatcttactgaggctctctgcattttctgaatttgagtgttgacctctttagctaggttggggaagttcttatggatgaaatttctatgtttctatgcaatgtatttctgtgttttccaaattgcttcaattttccccacctctttcagggacatgatttgacctcttttacataatcccatatttcttggaggttttattcattcctttttctctattcttccctgactgtcttatttcagaaaaccagtcttcaagctctgagattctttcctcagctaggtccattctgatrctaatacttgagattgcattcttttttttttggagatggagtctcattccatcatccaggctggagtgcaatggtgctgtctcagctcactgcaacctccgcctcccaggttcaagcgattctcctgccrcagcctccttggtaactgggattacaggcacataccactacacctggctaacttttgtatttttgtagagatggggtttccccatgttggccaggctggtctcaaactcctgacctcaaatgatccacccacctcagcctcccaaagtgctgggattataggcatgagccactgggcccggcctgaaattcttacagtgtggttttcagctcaatcaggtcagttacattcttttctatactagctatttttctgtcagctcctgtatcattttattatgtttcttagcttccttggattgtgtttgaatgtgctcctgcatctcaatgatcttcattcctattaatattcagaattctatttctgtcatttcagccttctcagtctgtctcagaacccttgctacggaggtactgtggtcacctggaggaaagaaggcagtctggttttttgagttctcgaagttcttgcactggctctatctcatctttgtgggctgaagttccttcaatctttgaagatgctatcctttggatgttttttccttttattctacttgataactttgagggtttgattgtgttataaggtggattcagtagactggttttgtttctggaaaattttaggcagccagtgctcagctcccagctcctgggctgtgtgctctaactctgggagacttgtactgggccccaattttgctctctggctcctcaaggtcgtcaactcattgcgctgggggggccwatgtgctcctggacagctggtcactacactctgatggatggtgccagccataccattttgtaggatggtggcagcagatccatccttgcttgcatgtgccagcagcggcagtggtggtggagtggcagtgtggaggggtgcagacttgtcagctgtggaagggtgctagcaggtgtcagggtgcctgtctccytgtgggcattcacagcagcagcagagacagaatggctcagggagccggggccctccactggcaactgtgcatgtggtcctgctggtggtggtgttagcacagggtgcagcacttgtgggcataggtctgtgtgcaacctctgtgcatgctgacacaggtaggggtggccactcagggcagggaagggtccgctgttctctgcacctagtttcactctagcagcagtgttggtacaggggcagggtgctggtagggccagggctggctgtctctgtgcccgccaaggctctgattgcaatggcaggggaggtgaggtgggatacactcctgtcagcagcagtagcagggcagtgtgcatgcacatgcasgctggcagggcaggaaagtcaaaatctgcccatgtatatagatgccagaaaagcaacatggggagggtggtggctgtgagcctgaggaagctgcagttaggggaaggagcaggcctccctactggatctctcctccagtcaggcatgattcctcagcagtacgggagctatgatgtagacccccaagacaccygtggctgcactgcaagcaggcatggccaggctgggcctcaggagaggccagaagatcaaggggtgctcaggtcagatcagccccctctgatgggtaagactgcctgcagagttcaagtctgacagttcccctgggtctaaagcctcccatgggagcaagtcaagcctagggggatggtctccctggccatgctctgctgcagacactcaagcaccaaaccctctggacttcacatcagctggtgtgctgcccctaccacttctctaagcagctctccctaccaactcaagtgtccctggtagtcaaggggtgtcctccagccaggattccagaggcctgtggcaagaataggttgctctctgccagttcaactcacccattcccccagcgtcactggaggtcccggtgcacaggtgtacagtggccccatacaggattcccaccttcctcccccttcagcccagcttctgtgtcttctctccaaccactctcagttgtttcctctgaagatctgttaggagtgtgccagtcatcctggtccctcagtggcagctgttccacctggctcacctggctgcatctagccaactagaggtagggcatcttgtcccctacctcatgctaaattttattgactatgttttctattccaggcttaatacagtagatatttttgttgcagcatggtgtagtggttaatcgcacagattaataacacactctgtgttcaagaatacacaaactttttcccaccgcccagactgtaatggacaatgatcacactcccagggccaacacaaggtttaggctagtgagatacctcaggcgcaaaatctaagggggcaccaaaaaaattcagtaaccaagataattttaatgaaaattattttaaaaagtcaaaattaatgtcaaaaagccataaagaatacaatagcaaaattttaaggacaggatcctaccctgaacttacacaattccacctcacttgcctcacctgatcctggccctgctggactctgtctttaaacttttaatattttgttaccagggattttaagcattaatttggaattttacaatattgcattaaaatttgatcttgattctgagttttggtgtcccattgaaattttgccacagggtcaagggcctcacttgcctcatcctcctcccagcagatccctgtgaataccttttgactttttttttttttttgtggaatgctcacagcctcttcagtgttttcgatcccaacaaccagcacataaacatctttcaatgtatgattaatgttaagcatatttccttaactgaaaaagaggctaaataatcacattggctaacattttagcaggtaataaccccatgcttgtaagcmctttacatgaattaactcacttaaatgcagagcaactctatgaagtaggtacttttttttatagtcatagagaggttaagtaacttgtccaaagtaatacagagtattacctgggaactagaatttgaattgagagagtgttattaatctgtgcaattaaccactacaccatacctcagcaaaaaatatctactgtattaagcctggaatagaagacacaatcaataaaatttagcatgagggaaggggcaagatggccgactagaggcagccagatagacagggatgactggcacacttctaaaagtcttcagagggaaggcacattgaaagaactccaaccacattctcaatggcatttgcttctcttcctgacttggttaggacccaatactatagaagacctttcacacccaactctttccttgacaaacactatgagaaaattgtaatgacctctgaggacagttctaatacctctctgataccatccagacaacagactccagaggacatgcaattttcaggaatatacatctcttattttgtcagaccaatggatctccttgaaacatagtcayagatctcgaaaatagcagtgaccatctgaagtcaatatttcataatgtaaaataccctccaaacaactggattctagaacactgttaattgtaaacagtgtcagttttataactacagtacaaaataatagctaaaactagtccagtatttaaaaaatatctactactcttacatctctagttaataaaatacaattggaaatttcgacgtttcttgaaatagcaggtaataaaccataaaaacaaggttattaagaacacrtctaaaaatttaccccctgtggtatatagtgtatcttaactggagatcatgcaaatttcctcagtttgaaagtgaggatggaaagcaaacatggtagcgttgagaaacattggactgggtgttggaggagtatatttgtgctagatcagcctattgagggcttctgttttcatcccactgtcctgcacacctcctgtataccatagttgtgcatgactgtaaaactatgcaaaaatccagaacataagaacctagtattctgggttcttgcaagttatagaacaaaaattttgaacgaggtaggagagagaagttagatcaggaaataattatgtttctttggggaatacaatgtttagttcttatgtgaaggaatgtatatttcaagaaagtgaatttcggcttattttcaattgtctcaggactccacaatgttttcttgtcaatagatactctgccagttcacattaaacaaacaacatgtgaaagccatttatggttattatggaaggctcattagcataaatgttactaaatatttgagatattaacttctctatatccttgcaaggcaactgcagagctaccctgcagatctgtaagctgtgcagtggtttaaactttcatgatttcaatttgctaccacctggggtaaagggctttggaacaccaagttcctgaagctccttaatttcttggcaagacttaagtgaattctaggatactcgatgcagtcagtttagtgctaatagatttttaaagacaaatrcatttaacatttacactcgatgggctttttaaaaacaaagcaattacttacatggcattaattatatgagcagcctccttctgacaatccaaatttttgtcttccagagtcatttctgaatatctacacattaggttctgaaaaaaagatcaaccctgacatatcttaaaggctcctctttagggatgaaagggaataaattaccaagaatcttttcagatttggggtgcttttgaccatggcagggagcctgagaacaaagcatgctagttttccctgggttatgtaaaattmcatgtagcttttccaagaagatcttgcagggtcaggctcctgcctgtctctccagcttcatcttgcactgcttgctctctcactcccttttgccaatcatgggcaggcctactttcagctacaagaagacacaagctttttccaacctcccagactgtagaggacagtatctacactcccagggccagtgcaaggtttaggcaagtgagatacctcaggcacaaaatctaagagggcaccaaaaaactcagtagccaagataaataattttaatgaacattattgttaaaaatcaaaattaatgtcaaaaaactataaagaatacaatagcaaaactttaaagataggatccaaccctgaacttgcacaattccacctcacttacctcaccctaatcctggccctgctggattctgtctttaaagtgttaatatcttgttacctgggattttaagcattaatctggatttttaaaatattacttatcttgattatgaattttagtgtccccttaacttttgccccagagtcaagggcctcacttgcctcatcttggtcccagcagatccctgtgaataccttttgacccattttttttttgaatgctcaaagcctcttcartgtgtttttgatccccacaaccagcatatgaggctctttccagaggaccacctgcaggttctactggatcccatttggcctgcacagaaggagagctggaagtatcaggaaacctaagcctgcctccctctcctgtctagccttccccatgaccgcatgggcttccctgagagcatatgcttgcataagaaccctcccatttgtacctacctccaaggcacaacataatcaggacctctctgtgccagctattccctgtgattcaaacactgtttctgaggctctttacatggctggttgcttcccattggctcactggtaaagaaatgtcacctattcctttgaccgccaaagcccttcctttctcccttatttttacagtatcctgtttgtttattatactttcttcccagtgctaggcatatacttattttatttacatccttactttttcttggttattggattctctcactagcagtcaagcttcaaaaggacaggaaacatacctgttcctttcattttggcatcccctggtgtcagcacagtgcccagcactcaactaataagtacacatcatttatcacctttgcttcctttgggtttggaacatgccccactgatgaaaaggtacccacagtttttaaagtggatgaccattttgtggttcctcttaaagttacgcataaaattacagaggaaacttgcttcagggacctgtattgtaaaaccctgagaagttttaaaaaaaaacaaacaaaagccctctaaagaggggaccattttctgctttcttaatacctgagacacagcctctatgtcaaatttcctaatttacaagaaaacaaaataaacctagctaatcattaaaaagtattattgagatatgtaataaaggattggaattataaatggtcaatgataaccctagattttagcatcctctgttagcatattcttgtccttgcagggatatagttacaaagtgttcaggtaagatctgtcaacagagctccaagggtggatgttgagttttggcataaaatcagaaayctaacttcttattttcagtggcactggggaatgggagttcacacacaccttattttggaaagagattgtcctgactactatttttctcagctttaaaaaawttttatttatttatttttgagacagagtctcactctgttgccaggctggagtgcagcggcgcaatctyggctcactgcaacctccacctcctgggttcgagtgatcctcctgcctcagcctcctgagtagctgggactaaagacacgcaccaccacgcccagctaattttttttgtacttttagtagagacggggtttcactatgttggccaggatggtctcgatctcttgacctcgtgatccatccgcctcggcctctcagcttctttttggcctttttcctcctttctggttgattcttactgaatcatatccccactgcatatcttcaagtcatggaatgtgtatacaaatgctcatacctgtttcccagaatccctttcattttaaatacctgtagctgctcatcaaggtaagggatttttaaaatttcgatagcagatggtcttaatgaaggattcttgttcaacatgctgtaatgtttaaacagaaaattatttttcaggtaaactaaaatataagtacaactttaaattatttctgtgacaacatgtttatttctatacctttccatgatggcatttagttcttttggatatctctcmgggagagaaggtgtgtcaccttcaacaatttttaaaacaatggataagaaattggagccagcgaatgcatgattcatgcagcacatctcatacaaaatgcatgccagtgacctgaagacaaagtcaaagaatttaaataaggaacaaatatcctattttaaattttttcmtcatacaaaacctcagatgtgttggggcattggctgtgaggcacaaacatacaatcagtagttgacttaaaactgcagtttcatacagtttttttccatttaaatacatgtttaccaaaaaaaaamccaaaaaagtgaaagaataaagcacaaaagtaagtctgaatgacagcttttttatcaaagaataagcagatcaagagttaacagtatgcctgcacatagtaagaattctaagtatttgattaatgtaaggattttttgaattagcttttaatacataaaatgcagctgaatattatcttcctaaggcagtttgataattttatatatgcaaaatataattttaatttagcagcctaaccttccctctaatgtgtatccaagcattttgaaaaggaaactggcattatttattattctctgaatataatccatttgcaagtggagtggaagagcagctacttgaagcccacattaaaatgtataattctcccatggtgagtatgaaacagaatattaaaattctagataagtccaacactgatttggattaaccatgcaaatcaataacctctaaaccagccggaaaatattttaaataactctacatcattaaaaaaaaaactgaaagggaaattcctgtctgagcttagtattaagaaataatggcacttctcctgaataatgaattatttttatcttatggacattatgaattatgtaactgtccaggttttccttttcatgttagtcacttgaaagataagaaataaacttgtgattgaccttgtgtaagttacattttatgtaacttttaacaatgtccttaatacaacaaaggatagacagaaataaatacatgaataataccattgaactattttgtgggtactcatgaaamtgtgcatttgtaagagaattttggatatgtacactgagaatatttctgttccagtaaataataacactaaatatttccaactgagctgactggtactttacattttacaaagcactgacaatatctcaacaatcccttataacttcccagtgaaatagagcccgtgtaatatttttcccatttttatagattgaaaattggctcagaaaagttaaatgacttggccaaggtcacataggtagtaaatggtagaactgactcttgaattaaggcatttatctttccaaatcctagactgtttccattaaagaatgctagaaagaagagggagatgttagaagaaagtgcatgaaatcaactagaataccaatatcaatgtaaatattaaaaatgatgaaaattatttgaaaatcaataaattttgcatctatctgcaagactattaaatggcatctggttagatttctatacccagaaaaaacagtccttcaaattaagaggaaataaagatgtttttagccaagcaaaaacagagatttcattaccagcaggaaagcatttcttaaatcctagacataaatttttctaacagaagaaaaatgatccagacaaaaacaatgagtacaagaagaaataaagagcaccaaaaaataagcataaatgaatattaactctacaaaataaaattaacaatatcttgtggtgtttaaaaattatgtagaataaaaattcatgacaaaaataaggcaaatgacacaagagggaaaagactccaattaaaaaactaaattatcagactggaaaaaaggtatattctgctcacaaaacaaactttaaatataggaatacagagaggttgatagaaaaaccatacaaacaccaaaatggcaagaaacactactaagattaagatggtggattaataaaacaaaccaccaggaatataaaacaattctaaatccatatacacccaataatgtgtgcgtgtgtgcatgtgcatcatgtgcatgtgtgtgtgtatgaagcaagaactgacagaattaaaaaaatcaataaagatagaaaaaatctacacgatgacaaaatggacataattggcaagttgatgtaaatgcaaccaacaataacagaattcaattttttttcaagggcacatggaacatttaccaaaattgacaatatacagggccataaagcaagcctcaacagattttaaggactgaaatcttcaaagtcagaccacagtaaaattgtgctagacatgaataacagagtgacagagaaaaagagataattgaaaaactataaaattgccaactgcttgaaaactaagaaatacacatctaaataatccttaggtcaaacaagaaattagaaaacacttttaatggaatgctaataaagataccaaatatcaacacattgaatgcagttaaggtgcttacagtaaaattaaaagtattaaatgcatatattacaaaaaaacttaatatctaccgtataagtcaatttgagaagttaaaaaaacagcaaatcacaccaaagaaagtttaaggaaataaattttaaaagagaagaaattaatgaaatagaaataaacaatagaaacaaaatcagtgaagactaatacatttaatagatttctagcaaggctgatcaagaaaatcagaaaaaaacacagattaaygataacaaatagaaaaaagtgcaacactgtagattccacagatattagaaagtattaagatgacattataaacatgttttttccaataaatttgataatatgaagttaacagtcttttaagaacacaacttacgacacaagaagaaaaagataatctgaatagtttttatctattaaacagagataatttcttatttaagataataaaactcaaagcagaatgaccatttgacccagcaatcccattactgggtatatatacccaaaggaatacaaatcgttctaccataaagacacatgcatgcatatgttcattgtagcactattcacaatagcaaagacatggaatcaacctcaacgcccatcaacggtagactggataaagaaaataaactgtggaatattatgcagccataaaaaagaatgagatcatgtcctttgcagcaacatggatcaacctggaggcaaactaacagaggaacagaaaaccaaatactgcattttctcacttataagtgggagctaaacattgactacacatgaatgcaaagaagggaacaacaaacacyggggcctacttgagggtagagggagaggaggaggttgaggaactcaaaaataaaaataaagaaggcggttgctgtaacaaactataagcaaacaaataaataaaggtttaaacacaaaaaatatagttaacaataatttattatatatttcaaaatagttagaagacttggaatgttcccaacacaaagaaatgataaatgtttgaggcaatgaatayctcaataacctagatttgatcattatgcattgtaagcttgtatcaatatatcacatgtgccccataaataygtacgactattatgtatgcataaaatttatttttaatgaaaaaaaactacctattttgtactatgcttaacacctaggtaatgacataatctgtacaccaagcccttgtgacatattawatatatatatatatatctgtaacaaacctgcacatgtacccctgaacctaaaataaaagttaaaaataataataactgagatagacaacagaagtatcccctgaccctctatctcaaaagtaaatattataaagcaatccttataaggaccctgtatttgtttggctttgtttttgcctaccaatgtattttcagcacaacaacagaacagtggctacctttatcttctcaatatagatatttgttgaatacagaaaaataaaataataaaaagctcttgcaaagaaaaactccaggaccagatggctttactgataaattcttccaaatatttaagaaataaataacaataatcttactcaacctcttcatttcgtaagaccaggacaagtttgatactaaaatataacaaggatattatgggaaaggaaaattacgagcaaatgttttcatgaacgttgattcaaataacccaaatttacacacacatattagcaaatagaatacgacatattaaaaagataatacatcatgaccatgtagattttatttcagaaatacagagttgacttaatatatgaaaataaatcaatcaaaatatatctcattatagaaaaaagttgaaaaattgtatcaccatctcaactgatgcaaaaaaagcattctataaaattcaaaatttattatatttttaaaaagaagaaaactcctagcacaccagatataggagggaacttccttaatctgattttttgaagcttaaaaatatatagtaaacattatgcttattggtgaaatattgaaagtttattattttcttctgagattaggaacaaaataagaatgcctactatcatcacttctattcaacattgtaatgaaggtgcttcccaaagcaataatgccagaaaaagtaaatttttaaaaaaatctataaagattagtaaagaaaacattagactgtcattaatcatgtcaacatgattgtgtacagaaaaaaatccaaagacctgacaaactgttagaattaacgagggaattacgcaagactgctgaatacaaagccctttatttctataaacttgcacaaaaacacacttaaagaggcccatgaaataccaaccaaaatcctagcagacattttggcaggaactgaaaagcagattctaaaatttatatggaaatacaaaggaacctgaatagccacggcaattaaacaagaactaatttggaagttttgtatgaccaaatatcaagatttattataaagttatatagcttatattataaagttatattacctatgaaagtgtggtattggcaaagaagaaaaaatatacaccaatgcaatcaaatagagggctcaaaaacagattcacacatatttaatcacttgattaatgcaaaaataaaccactgcatggtagaggaaaatatggctttttcaacaaattatgctgggccaattgaatattcatatagaaaaaaacgtacttggattcctgtctcataccatatagtcacatacacacacagatcaattatagatagatgttactgtgaaagacagaatgaaattgagtcagctttaaaagaaaacaggagaagaaaactgagttttaaaagaaaacaagagaatatcttcatgatcttggagtaggcaaagatttcttaagacataaaaggcactaatgataaagttatgaacttataaaatgaacttcattaaaattacaaacttctactcataaaaagacaccattaggagagtgaaaaggaagacacatagtgtaagatatttgcaattcaaatattcatcagactaccaaaatatggataaaattaattaaaacttctataaagcaataagaaaaatgagagaatccaatagaaaaatgggcaaaagacttgaacggacrctaaatggccaaaagtcatgagaagacgctcaacatttttagtcatcagaaaagtgcgaattacaaccactgtgtactaccactacatgctacacactcatcagaatggctaaaaagaaaaagacagacaataccaagtcagtacttgttatactatgaaaaaaaaagtttccttaggaaaacaagaggggctaaatatcactaaaaatatataatcatcaagttgaaccaaatacttttactaatgtagaatgtttatgttatgaattgccacaatatacttggttatttccccacagaagaatctataattcaaacttcaagaatgtcttcttacacagaatagtagagttacaagagactataaagatttgctcatttcaaactctggttttatcagtgagaaaaccaaagctcagagagaggaagtaatttgcccagaaaggtaccatgtcagatcagctcatgttggtattggtattagttctcatccaatactttttaaaacttctcttttaaaaagttacattgatcacattctgttatgtagcctaacacacacataataatctgaaaactgaaaaaaagaaatcaaatttgcaagtccaagtaacagaaggctagcaatcactcagcacctacacactctgttctgatgatttatgctcaccccacataggcttagggtctccttgaggacaagattagaaacagaacaagctagacaacctctcctggcctgggcatatcggaagggctgtaacaacaacccttgggagcaacaacccctgatccagaacattttaaagtgtcttggaagcagctattagattgtctccatcaataacacaaatggtaacaacaataatgataattataataataataatgaaaatgatagctggaatgttaatagtgtttactatgagccaggccctcttctatgttcctttcatattttaactcattaacttacactcacaacaatcctaatgaggtaggaactattattattcccatttttcagatgagaaaaccataagattaggtaaattgttcaaggttccatactgagtaggtcataaagctgggattgtagcccaggctatctggctctagagacacagactctctatgctatcctgcctctggatcttgcaccaatcagagcmttttggatcacgaaagtctctcttgagttggaaatcagggctagccctgacagagccttttaagcaggggctgatttcccaaggtaatttcaggttctatatagaaccttaattcacttttaaaaatcactggggccttagacaacaagctatgcagggcgtcacaccacggcaaatatagggcacacagactatgagaccttctatggaaaaaggaaggcagacaagtttggcttttgtcttttcattgcttggaaggaaagagggcttagtggtctattaacagtgaattgatcaccwttctggtttgatggagatataactctactttgatgaatttattaaggttataaaaagatgtggtaggccaggcacagtggctcacacctgtaatctcagtgacttgggaggctatggtgggacaatggttgaggccaggagtttaagaccagcctgggcaacatagcaagactgcatctctacaaaaaataaaaatatattaactgggcatggtggcccacacctgtattcctagctactccagaggctggagtgggaggatcacttgagctcaggagtttgaggttacagtgagctatgattgtacaactgcactccagcctaggcaacagagtgagaccatctctaaaaataaataaaaataaaaaagatatgcaattatctggctaaagaaactatggaacaattagattcatagcctaacttagtaatcaattaattctcatataagactacagtactctctgttttggaaatcctctcagctacactgtagtatgcagtgcaattacctgtttcactttgatgactagtatttgcttgcactctagcacrtagagaagacttcatttatcagccagtaacttgtggaaacggacctgctatagtggtcccagtgcacctacctggaatgggcgccagtaactgaaacttggacaatctgattacagaaactacctagatattcaaaggtaaaagatgtttggttacctaccatatctcagaaccactgtcagtgtttcccaaactttaacatrcatgcaaatcacttagaggttttgttaaatacatacggtaggtaaccaaaatacatatggtgactatatttctatgtaccagtgtttcttttttctagtttccaaccagacatttccatataggaatcatctaaaactcttcacttccatccttttaaaataattttcccttatttgactcccaggtcttaaatctgctgatacaaaagcagattgggggtgggggagagctgaaataaacaagtgagatgtgtattttacttagaagtctayaatttgcatttctttctttttccaaaatacagacaactgtgaagagataagcaaataaatccctgagggagtatgaatacaagcaatgaaaaagaaggctgggatcaggtgtctgtgaagcaaattacacctgaactccataaacttgccatctgtccaarttgaacaacttgtccggaactactgagaaaatttctgaagcacaggttgattgataataaatcacaaatgtaactcagactttgcttgtcttaaggtaactaaatttacccttcaaaatctgccagactctgcaaacagatgcctgccccagagcaatgcatgactctagttggttaggaagttttgttgatcttctagataatgttttattttgatgtaattgaagagcatcctgatatattcatctagaaaagaggaatcagttcaatctatggaaacagtaatggaaatgtaataaaagagtagtgggttttgctttagtgtgtatcaccctaaatgaaagtctttacttaggtagaattgagtattaacctaaattcagtctaaatataatgaaatgaaaataaatataatgaaaaacattgggctgcttgaagtaatagtacttaaggaacaatattatatagcaattttttatgaatgacctaccttatctcaaaacctctatcagtgtttcccaaactttaacatatatgtaaatcacttaggggttttgttaaaatgctgattccgagcatttggggggaaacagtagatacagtggaagcatagtttttagatctttcttgaatccacatatgaaaacagagcagctacagaacaaaactcaaaactcatgaataatatttattataatttaataataatttattataaagccaagttataaggtgtccccttgaaccttgctgtgcaagtgaaggaacacaaaccacacagctacttgactggcatagtatcagcatctgtgtgagaagaagcagagggaagcaatggagtgatcaagggacatgagaacagaagaacctcaaactatctaaagtggaccaatctaagcatagcaattaaacccagcaggggttctgcccaatccaaaagcagggtgaatgcaagaaatcccaagataaggcttaaagcagctggagcaaaatagttcagggctgtccaaaagaatttattgaactcatagaaatgttcttatttctacaaacaatagccaccagccacatttggcttttgagcactgaaaatgtggctagtgtgactgatgagctgaattttttaaagaatatttaaaaagaaaagtgaactcatttctcttatcatattctaatatactgtcacattttagggaatacgacccataaaattattgacaaaacaaggtttgggtgaattttctcctgttcataccagctctttctaattactttcctccacaactgagctttacaatgtttcaaggaagattatcaaagctctctcctctgtagtggtcccatgtcctccataccataagaatgtggctaatggaggaaaaagatcaaaaccagtgagtgaggagaacaaggagaccacagggtggcagaagagaaaaactggctaaaagtcaaagcttctttgcatctttagctattcttaaggtcacagttatagattttatgcaaaccatacagcttaggaaaggatgtttggagttggggtagggaggtaggttggcaatggaaacaatgatcaaagcatccttacataaccaactgttatttactcagccactctattaagaccgaatatggcaacagccgacactgcttatggggcatgaactgcttcacattttgactgaatggctgtgttccaactgctttaataattttatatgatctccagaggctcttttatgatggacagaacatcaaaagtagtagaatgtgccaggttaatagaagacctacctatctccctcctttagtctccaccaatcttctccctmctgtcagttttctatagcccagctggcatcataataagactgactcccctggtagattgattgctctttgcgaatattctttttcccttcccccacagggggaattggcayaggacttgcttcagccagtggaatatgggtggatatgaagtgtgtcacaactaactgagtggaggatctaaaggcagacacatgctctttctctctagcactgtattgtccatgtttttcagagcataacctgtgtcctggaactgggaaaactatggatcagagcaggactgcaactggagcagaaactcagttaatctgtagtcctcaggtaaggcaaagaatcaatatatgaagtacctgagattttttggagttctttgttacygcagcaaagctgactgatacatcattcctctgcttaacagcctttagcagwttctcatactccagaagatgaaagtacaagcttcttttcataattacatgggtcattcaccatctgacccctgcccgcccttcagtcaaatgtaccaacactcccctccttgccacatacacactttgtcctacagctaatcagaagaacctgagctttctcatgcttccatgtcctttcataccatttctcagagtctttcagtagtcagagaaggtccaagtcatttgtaactatttttaaattcccagtatatattttaaatgaacaaataaataccccaataaaagtttcaaaattggtgatatatctgaaattttggcattaaataaacacctttaacatataccacctcatttggaaataattttaaacacatacatttgaggcccttcatgaatgagaaggccctggccaaatggttcttctggccagccactttctttccctgcacagttccctccctcttctcccagtgggcacccctcacttttggtcattgacattgggtctttttacctgaaatacatttgccaaactcttctccatttttccccatcctgagcaggaatcatgcactctctaagactgtagctgatgctctctacccctatccccagctgtcaatcactctctgctttatacatcagaatatgtattgcactataacagtatacagcagtttgtttatatgtttatcattcctttgaggacagaaaccttcatgtcttcacgtctcttcccttctgcaaataccaccctaggggcaagaaggagtaaggctaaaggtatgagctattctggtacactgcctttctgaggtaggaggagaagccctaatttacaaatttccatggtataaataccatggttgttttcmagttactaatgtgacatcagtgaacattgacttgagaagaaatgtggataattgggtcttatgagctggtatgagctccagcataccactgaatcatgggaatgatagaaagataaggctggagtcagatggtccagtgctaggggtgacgttgaggtgggggttgggagaaagaaggcaaagtcaggaggaatgaaagaagagttctgaggcacatggaaaagttgctggtctggaagttctcagctgtggtccaggttcttgggttctacccatcaaacagaccagcaagtagagtgccagattgcttttctggcacaagccacttctcttaagcaatttattgagccttttgacataaagaaaacaaacactgccagattgtcatayggaggcctagattagaggctacttctcaactcctgcttgccgttctcctgatgaagtcctgctccagtcaccactgctgcataaaaaaccaccccaaaccttagtaccttaaaacaacaataatcagtcattttgatcatgaatctttttggtcagagattgacagggaagccttgaacctgctccccacagcatctgctggtgatgctcaactgaggcttaaggatccacttccaaaatggctcacgcacatcactggccaactgatgctggctatcagctggaagctcaatgggagtaaagaccaaaggccttggttcctctcaatgtggccctctccatgttggtctctcaatgtgccactcaggcttcctcacaacagggtagttgggttccaagaacaagaatttcaagagaaccaagcaaaatctatattgcttttattacctagattcagaagtcacatagcatcaattttgccataatcacaggcttacccaaattaaaggtgagggaacacagaccccacctctcagtaagagtgtgtcaacatcacattataaaaagaacatgtgagaaaagaacatgtgagaagtgatatgttatgatggccatttttggaaaatacaatctgccacatgcccctatggatcatgggacattttaccttatgctcctatccaaaggggtctccttcatcagaaacccaggccctgcccaggctctcatggccacactctttcctcgcccctgatgctcctcgctacaaagtgcccaatcctggaatttgaaagattcaatcccaatttgacttcctatagaaagactagtctcaactagggattccaagacttaaaacaaatttaaaaagcaaygtaaacaatgaagtgtggtgataagatttaatacttgccaaataaatttgcgtgtttgaaataagaacttgttaacacaactaaatttttctttagtaagaggaatgaaagaaaatcctgaactaaccctcccttctcctgctctcccacagaattaacaaaacaggagtatatgaatttgccacatcatttattaatgagttaaatctgtttggtcttctataaccttcttatacttatatattaatatctttttctagattcaggaagttctctgttactattccttttaataaacttcttactcctatttgtttctccacttcctctttaaggccaataactcttagacttgccttttgaggctactttccagatcttggaggtgtgctccattcttttttttttttttttcttttttctcttatctcctctgactgtgtattttccaatatcctgtcttcgagcttactaattctttcttctacttgatcaattctgctattaagagactctgatgcattctccagtcaattggatttctcaagtccagaacttctgcttgattctttttaattatttcactctctttgttaaatttatctgatataaatctgaattccttctctgtgttatcttgaattttgttgagtttcttcaaaacagctattatgaattctctgtctgaaaggttgcatttctctgtttctccaggattggtccctagtgccttatttagtttgttaggtaaagtcatgttttcctggttggtcttgacacttgtgaatgttcatcagtgcctgggcattgaagagttaggtatttattgtagtattcaccatctgggcttgtttgtacccatcctccttgggaaggctttccaggtatttgaaaatacttgggtgttgtgatctaagctacatctgcattggggccaccccaagcccagtaacactgtagttcttacagacttgtagaggtaccaccttggtggtcttagataacatgcagaataattctttggattacaaggcaaagactcttgttctcttcccttactttctcccaaacaaatggggtctctgtattaagttgcctggaactgggggtggggtgacacaagcactcctttggtcaccactactgggactgtagtggcaccaggtctcgtccaaggcccccataactacttcctattacctatgttcactcaaggccctggagctctacaagcagcagatgatgaagccagccaggtttgtgtccttcccttgagaggtgtgagtttcctaggtcctgggcaggtccagagatgctctcccagagccagggactagagttaaaaaccttagaaatctgcatggtgttatattctactgtggctgtgctggcactcaagtcacatgacacagtccttcccactctttcctccccttcctatgtgcagaggagcttcaccccatggccaccaccactacaggcctacagggaacattcccaggctaccactgatgctcaattaaggcctaaggactcttccttcagcttgtggtgaataccaccaggcctggaactcacccctcagggcagtgggttcccctctggcccagggaaggtccagcaatgctatccaagagctaagacatgaaatcagggactccaagatctcacttggtcctctacaccactgtggctgagctggtacctggtttttggttcttatgaaggtggttcctttgtgtagacagttgtaaaacttggtcttcctcaaaggataaatgctggaggagaaggataccacattttccatgatgtgattattatgaattgcatgcctatatcaaaatatttcatgtaccccataaatatatacatctactgtgtacccacaagaattaaaaatttaaatttttttaaaacctggtgttcctggggaggggcatgatcagtggggcccttattcagccatcttgcactgcccctcctccatcaatatcaatttaacaaggatttattagctatgttattaacccttttaaaattcatcaggccaaattagtactatctgcagagtttgtatcaaccatttcatgctagtcattgaaaaaaatatattaatgttcaaatatacttcacctgactgaaatgttttctcacctaagcttccattggatgaaaatactgacaccagtgcttattccctaggaaagcactccctggtcaatagctttcttctgaacccacataagaacttcccaggccatgggcaagtgaaaaaaattaattcttttgctccagagctttcttcaccaggagggagctgatgaagctgctggctgccagctactagatggcctcattttagttacaggaaatgctggcaagttggactgtatttctcaaaaaaataggctgttgtccccatcccttccctgtccaccctggaaatgttcttccatgaggatactttcttggtcctggcaggtcaggcaggtgctggttcttctctgttttcttctactcacagctaatccttgcatgacacttctrccccaagatcatgaaagcctgagtccaatgttgggcatgaactagattccttctctgtcccccacccaacyaacctccacaccaaatttctgagaaagaccctgagagcttcacagtacactctagatgttgccactattcccaccactgttccctttacttatatcacccaaagaatatgggggctacaagatcaaagagccatcyggttgggttctcacaacaaagtaaataagaccaacagtgaaatattgttttctttctgtctaattgcagtaccattattcaaataatattgtcctttatttgtttctcctaccaaaataacatactctaaatattcatagtttaaatcaatttaatgagctggcctaggaacccaactcatatttgtatttctcctgtgggtataagagtattcaacaattgcttatacaaatcagctgtgatcaaagcattgttctcagtaaacctaattatcctaactttgcaaataactttataaacttttggaacctaacccacttttaggagaaggacttcctgtactgaatgctataaataaatgaagccagaaaagtttaacagattgcagaatgaagataatgttacatatgggcaaacattacagatgaaaacataaytagtattaggccaattctcctttaagcaaattctcctttaagcattataaatataatatgtacagctattagtgctaaaacaaaacacctgtcaattattcataagtgtttctaatcctaaaaaaaaattccacaataaacagatgctacacactgagattcagagacaggttctcaacctcattcaatctaatttttctcagagtgtctactaaagattactcatcacacgtatgtatctgacactataattaatagttctctcttattatttccattttaggtttggcaatagaaatttcattaccagataagcccactttgattctgatacaaccaaggtaattactaaatccataataaggtggttatttagggtcaggatgatgatgaatcctaagcttgtacttgctgaaaagttaatctctgcaaggagagctaacctaatgctcagagaaacacattaaaatccttctgctttgtatattttggaggttttggctgttttttttttcttgagtcagacagttttgtaatcctaaagtatagcaatactatctgatatcccataatactccatgtaatagtaggagcaattttttaaaaagaaataacactgacataactgagacaaatactctatgctttcctttcctctctgtgggttctgttgcttttgttttctaggagatattcatctgatctggaaagcagatatagctgcctgtcaaaaggagccaggtttgttacatataattccaaaaacttaaatgataggctttgtaaattaatttactcctaattcagatggcataacataacatcttcttgagataccatataaccttaaactataaagatatatatttgaatctattttaaaatgtccataatattaatttttaaaattaaatgtaaagagatatataggtatataattgaaattcgatctgaagcaaagcccaaaattgatttctcaaactagagaaagggactccaaaagaagcaagatttctcttgataggtaggaatcctatcacttttgctttatacctaaggaatgttacacagtcttgggcaaatagtagatgttcaatgaagcaaaatttaaaggaactcattagttattcctctatacatacctttgtgatgtttggttttatttggtttgggttttctttttcttttggatgtggtagttaagggggttagaaggaaagaagacagaagatgataggtgaattggaaaagacctccagggcagaagtaagccaatgatgaaaaaaacacgtgaataatttagaaatgaacaattgcaagactgaattgaaaggacgggattcatggggaattgccatacccagacctaatcttgacaatgttctctcccatttggtaggcacgagaacaaggaacagataatgacccttgtgaaaatcmtaagcaatatcccctgttgtgattcacttttccctaaccagagaaaatgtaattttctactttgtcttctttagaagagtgaagtaagcacatcttttacactgcttgtctttgaaagctcagaactatttatgttgatttgcatacagtaattatttacttaattaacaagccctcagctagattgttctttcaaccctcaacaagcagaaaagtatataataagattcctcttctaaggaaaagaaataggatctattgcttacactagaacatactgaatacaattttccacatggcttctgcagtgagatttcacttagttccataacaaggaaggagaaattcctttaatataagagctcagagaaactgagacatctcagatgcatctgtcactgaaaatccagaaattttaaaatttagtttatcctagtctgggcgcggtggctcacacctgtaatcccagcactttgggaggctgaggcaggcagatsatgaggtcaggagattgagaccattccggctaacacagtgaaacccgtccctactaaaaatacaaaaaattagccaggcgtggtggtgggagcctgtagtcccagctactagggaggctgaggcaggagaatcgcttgaacccaagaggtggaggttgcagtgagctgagatcacaccactgcactccagcctgggcaacagagcaagactccatttcaaaaaaaaaaaatagtttatccttaaagccaatatctttagtaaaattcttaaaagtaacaaaaagaaaaaaatatagaaaagctgtacattccccacagagattgaagttaaccttaaaatagaataagcacagtacttagggttacaaatactttatttaataggttaacagaaatgtattaaaatttaatgcttatggtacattaagaactttcccttgtgattcaggaaccaaaaatccaaaaccaaccaattatcactgaataaaaagaatttttgaaactagtttaatgaaatatattgagttctaaatgcaaaagaccttcttttactctggtcacagaaatattcatgtcaaagggataaagtgaatgtatgcagtaagtaaatgagctgaaagacaaaatgtaccattcttttagggaagcagatgaagagtctagyccactascccactcaccagatgtccgactttgtgtcatagccttggtgtttcagagcctcaggactcatataatggggagttccagttaaagttgtggccaggtcacaggatcccattagaagtcgagaaactccaaaatctccttgaaataataattaatttttatgaatactttaagccaacgaaaaattagccctggaaattaacaactgaatgagtgcctaatttgaccattttattatgcaatggttcatagcattttaacaggaaagaaaagtaatatatcttaaattatacaacgctggtaaatagttttaaaaacataagttttataggagaaggaagactttgagccaggaaagtgaattatgtaagctaaaattctttatttctggaattatgggaaactagacaatttgatataaaaagctatttmaagtctgaataatggcaaacagaatgattttggaaaaactgaataagatgatatacaatttcacctgaggggagaagaatttgttcttaaatttacaataatggagcgttttaaagaaaagatctgagactatttaagaacatgactataaaaatttgaatctatcagctttttaatacttgcctaactagttgcayrcttttattccttccttccttccttccccaagtacaccctatatgatgattagatgatccagtagctgttatgaggagaggtacagttctgaagaactaaaggttaataaagccattatatcaacattttcattatctataaccacttattgcttgtgatgaaataatataaatgagaaacctgtagtaactaatcaaaccagtaaaatgattctaataacttgtaaagtgcctggcatgaaacagggaactcaaagtatatttgaaaaatctatcaaatatgtggtaaatttgtacacctcaatttatatcagatactcagaaacaaaacaattaggttttgttgggcccatctagaaacctgagaaatttagtgttcatttcagcagcacatgtacttaaaaatttgagaaatttaaacaaaccaatgattactctaatacttccacgtaccatttacttcaatttgatatgataatatctagaatatactgttctgygtttttggaattcatactttttaaaatcttaccaattttaaggagattatttttcagaaatacattctttgactttaagtctcgatgaagtatcctcctacaaaaggcaaaaaagatatacaacttcatgcagaatataacatttttaaatccccatgtaaataatatatgttgttgyacatgatttacacataaatatatactcccatagatatatctttcaatgtttaaaagctacaaagccacaatactttccagtttccctgaggaaacaaaagttttaaaataaagattttaaaggttggggaacatgtagtttggagaacggtgatatgctttcaactatttcaataggctatattttattatgtttttgtagcataatctacatagtactatatccagtaaccatatcctcaattgatagaccagtttgtaatctattattacccaaatgtccaagttttatatacttgtgaaaataataacrttgttgatgatatttaagaataggtaacatttattaaatctgactataagtcagtaatgtaaattatgtcagttaagacctttattttatggaaytataaagaactagaaaacttgaaaatctttgcataaaaaaactaaaatgccgaataaagtatacaaatatcttcatatatgcacagttgagctcacataaaaatgaaaaaaaatccctgcgaattattcaaaaagaaactgaaagtcattctaggccataaaacattaacaaatttgaaagaagagaaatcataccatttctgctctcacatcaaaatggaatcaaactagaaattaataacagaaagataactggaaaatcccaaaatatgtgaatataaaaccacacacttctaaacaatgaagaagaaatctcaagagaaattttaaaatattttgaactaaatgaaaatgaaaacacactttatcaaaatttgtgtgatatagcaaaagcagtgcttagagggaaatttacagcactgaatatatatattagaaaaaaagaaagatctaaaatcagttatctaagcttccaccatagaaaactagaaaagaaaagcaaattaaaccaaaagtaaggagaaatattacagcagaaataataaaattgaaaacaagaaaccaatagagaatatcaacaaaaataaaactggttctttgaaaagatcaataaaatcaactagcctctagccagcctaagtaaaataaaaagatagaagacaaaaactattaaaatcaaaaatgaaagagagggcgtcactacagattccgtggacattaaaagaataaaaaagcaatactattaacaatctataaccacaaatttgataacctagattaaaagaaccaattccttcaaagacacaagctgccaaaaatcatacaagaagtagacaatcaaataggcccatcttcagtaaatacattcaatcaataattagtaagtttccaaataaaaaacactgggcccagatgggttcactggcgaattctaccaaatatttaaggaagaaattgcaccaaatatctataatctctttcagaaaataaaagcagaggaaatactccctaactcattttaagatgtcagcatcatcctaacattaaaaccaaacaaagacattacaagaaaagaaaactaaaaaccagtatctctgatraatgtagatgaaaaaatcctcactgaaatattagcaaatcaaatccaacattgtaggccaggcgtggcagctcattcctgtggtccaagcactttgggaagccgaggtgggtggatcacctggggtcaggagttcgacaccagcctggccaacacggtgaaactccatctctactaaaaatacaaaagttagctgggcatggtggcaggggcctgtaatcccagctacttgtgaggctgtggcaggagaatcgcttgaacccgggagacagaggtagcagtgagctgagatcaccccactgcactccagcctgggtgacagagcgagatgttgtccaaaaaatatacatatatatatccaacattgtgtcaggagaattatacaccacaaccaagtgggatttatactaggtatgcaaggctgctttaacacttgaaagtcaattaatgtatccatcacatcaacagaataaagaagaaaaatcacatgaaaaaatcaatagatgcagaaaaagcaattgacaaaatccaatacccattcatgacaataactctgataaactagaaacaggaatatttataacaaacctacagctaacatcacactttacaatgagaaccctgamgtttttctgctgatatcaggaacaagggaaaaatgtcccctctaatcatttattttcaacattatactgaaagtcctaccwaattaagtaaaacaagaaaaggaagtgtaaaaggaatagagatgggaaaggaaaaaacaaactctctgtttacagatgacatgatcagctaagtagaaaatccaaaagaatcaattaaaaaaacctcctggaattaacaagtaattaattctgcaatgttgcagaatacaaggttgatacacaaaaatcaattgctttcctatataccagcaatgaacaagtagaatttgacatttatatcaaactatatttacattagtacccctgaaatgaaacacttaggtataaatctaataaaatatgtacaagatctatatgaggaaagctacacaactgtaatgaaaaaaaatcaaagaagaactaaataaatggaaaaataatccatgttcatggataggtagactcaatattgtcaagatatggattctttccaaattgatcaatagatgcaatgtaaccccaatcaaaatcccaggaagttattttgtagacattgataaacagattctaaaatttgtatggaaaggcaaaagatccataatattgggtcttttgaaggagaacaacaatgttggaggactgatactacctgatgtcaagactttctataaagtacagtaattaagacagtacagtattggagagaaaaaaaatcaataaaacagaatagagagcccagaaataaaactgcgtgaatacagtcaactgatctttgacaaagaagcaaaggcaatgcaatggaacacagtcgtttcaacaaatggtgctggaacaactgggcattcatatacaatagatgaatctagacacagaccttacagcctttgcaaaaattaactcaaaaataaatcataggcctaaaaaatataaaactataaaactgctagaaaataatatgtgataaaatctagatgattttaagtttggtgataactttttaaatataacaccaaagtcacaatccatgaaagaattgagaagctagactttattaaaataaaaaatttctgctctgtaagaaaacactgtcaaggaataaaaagataagccacagactgggagaaaatatttgcaaaagacgtatctgatagactgttggccgggtgcagtggctcaagcctgtaatcccagcactttgggaggctgaggcaggcagatcacaaggtcaggagatcgagaccatcctggctaacgtggtgaaaccccatctctactaaaaatacaaaaataaaattagccaggcgtggtggtgggcacctgtagtcccagctacttgggaggctgaggcgggagaatggcatgaacctgggaggtggagcttgcagtgagccaagattgcgactctgacacgcctgcgtgacagagcgagactcagtctcaaaaaaaaaaaaaaaaaaaagactgttatccaaaatatacaaagaactattaaaactcaacaataagaaaataatctggttttaaaatgggccaaagaccttaacagacacctaaccaaagatgatatacaaaaggcaaataaacctgaaaagatgttttacatcatatgtcatcagagaaatgaaaattaaaacaacaatgaagtaccactacacacctattagaacggcccaaatcgagacactgacaacaccaaatgctcacaaggatgtggagtaacagaaactctcattcgctgctagtgggaatacaaaatggttcagccactttggaagacagtttggcagtttcttacaaaatgatacaaatgcttatcacataatccagcaatcatgttccttggtatttattcaaatgaattaaaaactatgtccacacaaaaacctgcacaatggtgtttatagcagctttattcataattgccaaaacttgaaagcaacaaaagtgtccttcagtagcggaatggttaaataaaccatggtacattcacacaatagaatattatttagtgctaagaagatatgagctattaaggcatgaaaagacatggaagaaacttaaatgcatactactaagtgaaagaagtcagcctgagaaatctatatatgattccagctatatgacaatctggaaaatgttaaactatggagacaacaaaaagataagtggttgccagggtttaagagggagggaagaatgagtaaggagagcacagagaatttttagggccatgcaacaactttatgatactaaaatgatgggtacatgtcatacatgtgcccaaactcaaagaatgtatagcactaagaatgaaccctaatgtaaactatagactttgatgataatgatctgtcaatgtaggttcatctgttataacaaatgtatgactggtagcaatgctgataacaggggaggcaatgcatgtgtgggagcagggggtataagggaaatctctgtaccttccactcaattttgctgtgaacctaaaactgctttaaaaaataaagtttattttaaatttttaatcagagctttgagtagattcaataaacttggatttcagggtccacaaaggaagaggtatcttagtaaaaaactaaacccttcagctgaaagctctgaaaaacttcttcatagaaataaaggcaaactgaaaatagaccaaccctccaaaagcctacagcctacagttaaactatttcagttcctcattagatcaaggtgatctgccctaaatataactgtcaggcagagaaaagtaatatcatctaacatctctcaatatttcacatatattgttcagcattcactcaaaaactaccaggcataccaaaagataagatcaaatgattaaaaaccaaaagaaaaaaagagatatagaaataaatacacaagtgatccacctattgaaattattggacaaggatttgaaaataactgtgattattgctcaagaaaataactgacacaatggagaatttcaatagagagctagattctatatattttctatatagaaaatatatatatatttttatatgcactaggagtgcatatatatattttctaggaatcaaatggaaattctaaaactgaaacaaaattttactaaaattaagaatttagtgcatatgtttgaaatcaaattagacacagcagaagagaggatttagaaactggaataatggttagtgaaaagtatttcaactgaggtgcaaaaagaaaaaaagattaaaaacatagaaaaggctaggcacagtggctcacgcctataatcccagctctttgggaggccaaggtgggtggatcacctgaggtcaggagttcaagaccagcatggccaacatgatgaagcccatctctgctaaaagtacaaaaattagccgggcatggtggcaggcacttgtagttccagctactcaggaggctgaggcaggataattgcttgaacatgggaggcggaggttgcagtgagccaggatcgcgccactgtactccagcctgggcaacaagagtgagactctgtctcaaaaaaaaaaaaaaaaaraaagaaagaaagaaagaaaaagaaaacatagaaaagagtataagagacatctgaaatacaggcttaaagttctaatatatatataaatggattcctagaaggagtgcatagcaatgaagaacagaatgtgatggtctaacatacatctttaagcattgtaaaaggagaataggggagaagcaaaattcaaagagagaatgacgaggtattttcagaatttagaagttttcatgaattcacaagctcagaagcaaaagaaatcccaagcagaatttaaaacaaaaatccacaagtagacataacactgtaatattggaaaacaccaaggacaaagatgttgagaatcaactgaaagaaaagacattaccttaataagaatgtctgttacatggaaagtgacttaacatcaataacagaatccagaagacagtgagataacattttcaaaatgtcagataaaaatctgtcaatctggaatttcatttttaataatagctaaataataatacatttttagctgaaatagtagctaaactattataaaaggatgaggaaaaaataaaaacattttcaaacaaacaaacaaagaaactgagtgtttatcattcacgtaacttaaggatttgttttggggaggaaaaaaaatgaccacagaaggaagacatggggtggaagaagaagtggtgaaccaagagattgataaaagtggggaaatctaaactagttttggcttgtaaaccaataataatggtagcactaattaataatttgtggggtacataaaggaagtagaactgaaatcctgaataaaaataatagaaaagaaggacacaattggagtcaaagtctttaagaagaaattgactgcagtgtatctgtcctcctgcttaaataggagaacccagtctgggagcagtattcttgagccttaggtcagaaatggggttgtggctttagaaaatgaaaatctgtcctttaaacaccaacttaagtccttcaatggctctgcactgcttccagaatagagtctacagttctatatgtggcctgctagagatttcaagatctggccctaccaatgcttctggcagccttagcaaatgcttgagccacatttctattaatatcatctcttcctcttcacagttcttcactcacaggagatgctcaataaatgcatgttggtttttaaaacactatccttggtacaaagatgaatactatctagtgggactcattcattaatccaaaaaacaattattgagtgccaactagatgttatgtgctgtactacataatgtgacagatacaaagattcataagacaaggctatgtatctcataatgcttacactcaggttagagagttttttttaagtacatcagcaactgtaagagatggcagaagggaaacctaaccactgtcactttactaaagaattatttataattgtaaataattaccaataaagacattcacctggtcataaggaaatatctctctcagtaaatgatcactctcagttacatgcccaccaaattaatattactattattaattaaaaccagaaatatcaattataaaaataatttttaccattagaattaatgatagtacaagtgtaataatgttacctttgtaaagtgttcaggcctcaaccatccagctttattctgactaagcaaattctgactaacaacattttaaagaaaagtcactcataaagatcatatagtttactttataggacacaaatgggcagaaactcaaccgggcctataamatcagcatataaagtgaagaattggatatgatagtgagaatttcccctaattcaaataatctttagcctctttaaccctttagtggattagagaggaataagtatgtttctaagaatagagagaaaagagaagagcaaaactagacaatgcaacactaggccacttcatcttgaggtccataaccccagatgctataatcctaagcactatactactatttttttactgttatgcccaatctggagatgaggaaatcaaggcctagaaaggccaaataacttgcccaatgttgtatagcctattggttcaaactgaggtctctttgactctataaaccactattctcacataggtctgtttatctataaaaactttgctatttaataactattttctactgccttcttacattcccacgatacctagacctatgctgtacatgagtatgttgctgacttcttaactgatttaaaaagagaacaacagtatttactaactgtgttaaatgaaacctggctttctctatgcctactcttggggttctcttggtgtggcaggaactgtgaaatgcctacccaataaccattctcctcctcttctcccttgacaccagaaccccatgagcctctggggaggctcagccctcctcagacctgttaggtaaaggaagtggggggtgtagggggtgaatgtggcagggggatatgattgctgagttagatacaaaactggttaatgcccaacaaggccataaaccatcatcaccagggatatctgttctactggacagaaattatttgcatctctgctggacaaaaatattcaagtgtgcctctgcctccacagagttaggaagtagcccagataatagaaagttaagtccagcactgcagtggaaaaatatccactaatatcttttgtctcttccatgttttttgaaatttttctaacatcaatgagacacaagggaagtctgctggaatcttgtaggaaatacttccctactcttataaaagacaaaaaaaggggggagtgacatgccatatgtcccttttaccttttctggagtttggttactgttgtgtgaaggcgggatacgtggtcgtgttacagccattctggcaaccacaagaggacaagtctgactacaaaagccaaacacactgagaatggtggaataaagagaaagaactagaaccccagagaatactgctcagccacccaagttaaccagctctagaacaactcactttggagacttcatgttaggcaaggtaataaattttctctactgtttaatctgcttctgttatttgcaattaagagtgtcttaagttgatcacttggtttctatagctattgattctaggaagtcaaagagacaacaggtttaggatttgcaatagtgagctaaggagcccaccagaagacttggtgctgtaactttggagtaagtaaaacattccaaagaaactcacctratgacacctagactagacaagcagaagatgaattacaaataatacattgataggcctctataaatatataaattagtaactcatcagtagatactttaagaataaggcatacaatatgttagaaagcagttatgagaagtaattagctggcactgtggtaatggaacaataaattctatgcaacaaaccaggtatcaagctatttgctaaatatctattgaaaaattataattggccatgcatggtggctcatgcctgtaatcccagcactttgggaggccgaggcaggcagatcacaaggtcaggagttcgagaccagcctggccagcacggtgaaaccccatctctactaaaaatacaaaaattagacgggcatggtggcgtatgcctgtaatcccagctacttgggaggttgaggcaggagaattgcttgaacctgggaagcagaggttacagtgagccgagatcatgccattgcactccaccctgagtgacagagcaagactccgtctcaggagaaaaaaaaaatcgtaatgtattggctttgtggttacagtaagccaaaatgagccagcataattttatcctatgtttggctaatatccattcctttgaagtatatgaaaatgaaatccaacaaatamtaaggtaacaggcaataaagtttatatgaaatctttcttctaaaaagctcaacacagttctccatctattatctcaagtgcaccataccatatctgttcaagtggtgggtccctctcatttctatgtttcatgacacccaagtgatctggttaagatttgctgacagtttctggttcaaattcatgctaaaaatcccatctccatctccccatcaggtcattcttccccagcatccagggcccatgctaggatgaagaacagtctgtggaggtacagagggcaggcatttctcaggcctccagcccaaggtagaactgtggagaaggtatggacaattcctctcacctcccctcaagccctaatatgaacagtttatgatatgaaaccctccctggaggtctatccytcatctagcaggttctcagggtggatcacaaactcttcttgccaaaggtgctggcacagccaatggctcctttgtgatgcacaacccaggcaactcctgttactggtctttgccatgtggcccctgtcctgggcactgaggcacctgcctttcttcatcagtctcattcccctcactaacacaatgagtcctctatgttgtaagtcagaagcagggtcaggtcttcctcaaactattggccactgtcagcatatcaggagtgtgcctacacctggctcaggggtgaggttaccttgaaaaagtgactgcaggatatcctcaagaagtgaggaccaggagaaagcaggaatctccagtaacaccaaacacaacttctctctgcttttccaycttcaaatctggggtaggacacctccttccacagtcatatttacggactcagatttccaagtatggctcttccctggaagcctcactacattaaaaatgagttcttaacactacctttcaggaaaaaacacaacagggaggaggttccaagatggccgaataggaacagttccagtctacagctcccagcatgagcgacacagaagatgggtgatttctgcatttccaactgaggtaccgggttcatctcactggggcttgctggacagtgggtgcagcccacagagcgtgagctgaagcagggcrgggcatcacctcacctgggaagtgcaaggggtcagggaattccctttcctagtcaagggaagccgtgacagatggtacctggaaagttgggacactcccaccctaatactgtgcttttccaatggtcttagcaaatggcacaccaggagattatatcccatgcatggcttggagggtcccacacccacggagcctctctcactgctagcacagcagtctgagatccaactgcaagggggcagcgaggctgggggaggggcgtccaccattattgaggcttgagtaggtaaacaaagtggcctggaagctcaaactgggtggagcccaccggagttcaaggaggcctgcctgcctctgtagactccaccactgggggcagggcatagctgaacaaaaggcagcagaaacttctgcagacttaaacgtccctgtctgatagctttaaagagagcagtggttctcccagcacagagtttgagatctgagaacggacagactgcctccttaactgggccctgagccccgagtagcctaactgggaggcacatcccagtaggggccaacagacacctcctacagccaggtgcccctctgagaccaagcttccagaggaaggatcaggcagcaacatttgccattctgcaatgtttgctgttctgcagcctctgctggtgatacccaggcaaacagggtctgcaatggacctccagcaaactccagcagacytgcagctgagggtcctgactattagaaggaaaactaacagacagaaaggacatccacaccaaaaccccatctgtacgtcaccatcatcaaagaccaaagggagataaaaccacaaagatggggagaaaccagagaagaaatgctgaaaattctaaaaatcagagcacctcttctcctccaaaggaactcagctcctcrctagcaacggaacaaagctggacgaagaatgactttgacgagttgagagaagaagggttcagccgataggtaataacaaacttccccgagctaaaggaggatgttcaaacccatctcaaagaagatraaaaccttgaaataagattagatgaatggctaactagaataaacagcatagagaagaccttaaatgacctgatggaactgaaaaccatggcacgagaactatgtgacgcatgcacaagcttcagtagctgacttgatcaagtggacgaaagggtaycagtaattgaagatcagatgaatgaaatgaagcgagaagagaagtttagagaaaaaagagtaaaaaggaacgaacaaagactccaagaaatataggagtatgtgaaaasaccaaatctacatctgattagtgtacctgaaagcgacagggagaatagaaccaacttggaaaacactcttcaggatattatccagaagaacttccccaatatagcaaggcaggccaatattcaaattcgggaaacacagagaatgccacaaagaaactcctcaagacgagcaactccaagccacataattatcagtttcaccaaagttgaaatgaggaaaaaatgttaagcgcagccagagtgaaaggtcgggttacccacaaagggaaacccatcagactaacagcggatctctcagcacaaactctacaagctagaagagagtgggggccaatattcaacattcttaaagaaaagaattttcaacccagaatttcatatccagccaaactaagcttcataaatgaggcagaaataaaatcctttacagacaagcaaatgctgagagattttgtcaccaccaggtctaccttacaagacctcctgaaggaagcactaaacatggaaaggaacaaccagtaccagccactgcaaaaacatgccaaattgtaaagaccatcgatgctaggaagaaactgcatcaactaacgagcaaaataaccagctaacatcataatgacaggatcaaattcacacataacaatattaaccataaatgtaaatgggcgaaatgctccaattaaaagacacagactggcaaattggataaagagtcaagacccatcggtgtgctgtattcaggagatccctctcatgtgtagagacacacataggctcaaaataaagggatggaggaagatctaccaagcaattggaaaacaaaacaaaacataaaagcaggggttgcaatcctagtctctgataaaacagaatttaaaccaacaaagatcaaaagagacaaagaaggccattacataacggtaaatggatcaatgcaacaagaagagctaactatcctaaatatatatacacccaatacaggagaacccagattcataaagcaagtccttacagacctacaaagagacttagactcccacacaataataatgggagactttaacatcccactgtcaacattaggcagaacaacaagacagaaagttaacaaggatatccaggatttgaactcagctcagcaccaagcagacctaatagacatctacagaactctccaccccaaatcaacggaatatacattcttctcagcaccacattgcacttattccaaaattgaccacatagttggaagtaaagccctcctcagcaaacgtaaaagaacagaaattataacaaactgtctctcagaccaccgtgcaatcaaactagaactcaggattaagaaactcactcaaaaccgctcaactacatggaaactaaacaacctgctcttgaatgactactgcgtacataacaaaatgaaggcagaaataaagatattctttgaaaccaatgagaacaaagacacaacataccagaatctctgggacacatttaaagcggtgagtagagggaaattcatagcactaaatgcccatgagagaaagcaggaaagatctaaaattgacaccctaacatcacaattaaaagaactagagaagcaagagcaaacacattcaaagctagcagaaggcaggaaataactaagatcagagcagaactgaagaagatagagacacaaaaaacccttcaaaaaatcaatcaatccaggagctggtttttcaaaagatcaacaaaattgatagacagctagcaagactaataaagaagaaaaaagagaagaatcaaatagatgcaaaaaaaatgataaaggggatatcaccaccgatcccacagaaatacaaactaccatcagagaatactataaacacctctactcaaataaactagaaaatctagaacaaacggataaattcctggacacatacaccctcccaagactaaaccaggaagaagttgaatccctgaatagactaataacaggctctgaaattgaggcaataattaatagcctaccaaccaaaaaaagtccaggaccagatggattcacagccgaattctaccagaggtacaaacatgaattggtatcattccttctgaaattattctaatcaacagaaaaagagggatcctccctaactcattttatgaggccagcaacatcctgataccaaagcccacagacacacaacraaaaaagagaattttagaccaatatccctgaggaacatcgatgcaaaaatcctcaataaaatactggcaaactgaatccaacagcacatcaagaagcttatccaccacgatcaagttggcttcatccctgggatgcaaggctggttcaacatatgcaaatcaataaacgtaatccatcatataaacagaaccaaagacaaaaaccacatgattatctcaatagatgcagaaaaggccttcgacaaacttcaacagcccttcatacccaaaactctcaataaactaagtattgatggaatgtatctcaaaataataagagctatttaggacaaacccacagccaatatcatactgaatgggcaaaaactggaagcattctgtttgaaaactggcacaagacagggatgccctctctcaccactcctattcaacatagtgttggaagttctggtcaggggaatcaggcaggagaaagaaataaagggtattcaatcaggaaaagaggaagtcaaattgtccctgtttgcagacgacataatcatatacttagaaaaccccatcgtctcagcccaaaatctacttaaactgataagcaacttcagcaaaatctcaggatacaaaatcaatgtgcaaaaatcacaagcattcctgtacaccaataacagatagagagccaaatcatgaatgaattcccattcacaattgcttcaaagagaataaaatacctaggaatccaacttacaagggatgtgtataggacctcttcaagtagaactacaaaccactgctcaatgaaataaaagaggacacaaagaaatggaagaacattccatgctcatgggtaggaagaatcaatatcgtgaaaatggccatactgcccaaggtaatttatagattcaatgccatccccatcaagctaccaatgactttcttcacagaattgggaaaaaaaaactaaagttcatatggaaccaaaaaagagcccacattgccaagacaatcctaaaccaaaagaacaaagctcgaggcatcacacaacctgacttcaaactatactacaaggctacagtaaccaaaacagcacggtactgccaccaaaacagagatatagaccaatgggacagaacagagccctcagaaataataccacacatctacaactatctgatctttgacaaacctgaggaaaacaagcaatggggaaaggattccctctttaataaatggtgctgggaaaactggctagccataagtagaaagctgaaactgggtcccttccttacaccttatattaaatttmttcaagatggattaaagacttaactgttagacctaaaaccataaaaaccctagaagaaaacctaggcaataccattcaggacataggcatgtgcaaggacttcatgactaaaacaccaaaagcaatggcaacaaaagccaaaattggcaaatgggatctaattaaactaaagagcttctgcacagcaaaagaaactaccatcagagtgarcaggcaacctacagaatgggagaaaatttttgcaatctacccatctgacaaagggctaatatccagaatctacaaagaacttaaacaaatttacaagaaaaaatcaaacaaccccatcaagaagtgggcaaaggatatgaacagacacttctcaaaagaagacatttatgcagccaaaagacacatgaaaaaatgctcatcatcactggccatcagagaaatgcaaatcaaaaccacaatgagataccatctcacaccaggtagaatggcaattattaaaaagtcaggaaacaacaggtgctggagaggatgtggagaaataggaacacttttacactgttggtgggattgtaaactagttcaaccattgtggaagacagtgtggcgattcctcaaggatctagaactagaaataccatttgacccagccatcccattactgggtatatacccaaaggattacaaatcatgctgctataaagacacatgcacacgtatgtttattgtggcactattcacaataacaaagacttggaaccaacccaaatttccatcagtgatagactggattaagaaaatgtggcacatatacaccatggaatactatgcagccataaagaaggatgtgttcatgttctttgtagggacatggaagaagctggaaaccatcattctgagcaaactatcagaaggacagaaaaccaaacactgcacgttctcactcataggtgagaactgaacaatgagaacacttggacacaaggtggggaacatcacacactggagcctgtcatggggtggggggaaggcgagggatagcattaggagagatacctaatgtaaatgacgagttaatgggtgcagcacaccaacatggcacatgtatacatatgtaacaaacctgcacgttgtgtacatgtatcctagaacttaaagtataataaagaaagaaagaaagaaagaaagaaagaaagaaagaaagaaagaaagaaagaaagaaagaaagaaagaaagaaagaaagaaagaaaacactacctttcagggaacattttagccactctaccacaatacctcgccaagctggctgggaaatccatgggcagtgaggtgatgaggaagccgtcttggagtaagtgcccagccctgttctctcctctacttggaaagcaccaaaatcagcaaggccttgagaccaccagcaggtgggctctctgcagagaggctgctctgtcctttatcttaagaaattgacataactgaactccccgcccagaacagtaatgggtttcagtgcaacattctcaagatagcttctagtgaactgtgaattttctcaggttttaacatcattatttatgtgtttatgccatatgttatagatttagaataatgtataaataaaccaaattaaaataagtacaggaagctccaaaggagtgaacagattcttcactttttctgtaacttcattcttcttagtgtttccagggtcttctttatctcctctacggctgcactgtattagtctgggttctaatgataaatgatttattatgaagaattggctcatgaattagggaggctgagaagtcccacaatctgctgtctacaagctagagacccaggaaagccaatagtgtaattcagtccctgtccaaaggactgagaaccaggggagccaatggtgtaaatcccagtctgagggtaggagatgagatgtctagcttaagtagtgaggcaggaacaagggggcaaattcctccttcctctgtcttttgttccattcaagccatcaagggattggatgatgcctgcccacactgtggagggcaatctactttactgagtccacagattcaaatgctaatctcatccagaaccatcttcaaagacacacctgtaaacaatgtgtaattctgggcatctactgcccagtcaacttgacacataaaatcaaccatcatatatataaactaaaatttttgcaaggcatttgcaacaaacctaacctcttcacatgtattgtttccaaggtaatcttaactcatatgtaagccaatttatgtaattttcaaaatatactttaatatatactgtagatcatataaggagaaaactagaataatgctttgtagacaagcctatatttatcagctgtaatttgaaagattttagtctaaagctgagtgaaacattgtagtagacttattcttgttcccaagtattcacgcttcttattccttgcagtgaggggtccctttgggaggaagaggcatctccaccccctctgacattaagagtggtcatgtgacttctctggttaatgacatgtgagcagactggatgattgtcatgtctgagcaaggggtttccactctcttgcttttccctccaccaggagtaaagcctgtcctggatagggctgctccttcagtttgggtactggaatgaagacatgtagagcagacttgcagatgacccatatctgtcaatatgcaacatgagcaggaaatgattgctgctgtaagccacgacactggagttttgttaatacagcatgactcccttcggcaagaacatgttttagtgctacgttctcaaagtagctttcagtgaactgtgaatagtcttggctttttaattatttataaatgtttatgccatatgctaaaaaaaatcattcctttggatttaaaaagttttaaagtcagacaattaagataaataagtttattttctgaaggaaacatgttttatactaaattaaatactgaaaaccaacagaagtgaaacatagattatacatttacaatcaggaataatatatatataactgctccatttaaaaaccattctaaaattggatcaagatgaagacaacttcctccccctcctcactccaacttcctccccctcctcactccaaattcccagaaatacaagaaatttttcaagaggaaattcacaatagtgctagaaaacaatagttatatttaagcaagattgcctttttttttttttttttttgagagggagtcttgcacygtcacccaggctagaatacgatggtgcaatctcggctcactgcaacctccacctcccaggttcaagccattctcctgcctcagcctccaagtagctgggattacaggtgcctgccgccatgcctcgctaattttttgtattttcagtagagatggggtttcactatgtcggccaggctagtctcaaactcctaaccttgtgatccacccgccttggcctcccaaagtgctgggattacagacgtgagccactgtgcccggcctgctttttctttttttccccaaaaattcaggaaagaatgcaggaagagaaactcaaaacttaaaacactattagaagagtcctgcctctgcatccctctacccacagcagccactagttcaaccatgcattctgcacagcttttctggcttctccttctcactcttcccacttattggcttctgatttctaagattacctcctaaaactctatttgtaccctagtctttgtttcagrgctctgatattgtaggaacccaaacaaagtcaagccctgatggttccctaagatccagagcctcacttctaacttccttctctcattctcattctctctctctcctccctctccttcttctctctccatattctacccagcrtattcataattaaactcatcaccattgtttcaaacctgtctttccaatttctcattcatccaggcacaaaacctcaggttcatctttgaccttctatcacatctcagatacacttaattgcaagtccagtcatttcaacttactgagttcattctcatctttcctcattctacccacctctgccagcttggtttaggtctcacaatctcatgcatggatattataaaaggttcttgactgataacccaagttaccttctctccttgatataatttatcatctaaccttcctgaagcaagctctggcaatattatataactccactcaaaaagctcttgtggagttcaatgtctatgctccaaaataaagccctcttgacctcagcctacctttgcaaacaactttattcattactccaagaaccttcccaatagaactactcatgattctctctaaaagttccatgttttcccacctctgtggctgtgctctgttccctatatctggaaagctctgacccatttttcatcatacttgaaacctaccttgggtcaagtgctacttcttccaagaagaagcctccattgattctccaaatgaaaacattatctctcttctgatctcctgtaacactaaattgtacttttcttggcccttttatcacttgttttaaactagagtataacttacattaaaatgcaaaaatcttaaatttgatgattttttacatatatatcaacatctgtaccactcttgtaatcctctatccagattaagatatagaacatttctaacatcccaggtttctttgtgccccttccaggcaaaacccctttgcaagagtaatcactattctgacttatcttaggttagttttgcctatttttgaacttcatataaatgtagtcatgcagtatacactcttttgcatctggcttctgtcatcctacctctgatctctgagattcacccaggtcatgcttattatcaattgtgtattgtttttaaattatagaatagtaattttaaaagtccattatagggccataccacactcaggttaaccattccactgtagatgaatattttttaatgttttcactattacaaaaaaggcttctatggacatttctgcataccttttgttggacatcagcactcatttctacccttaggaatagaattactgggtcatagctatttgtatgtttggcttagaaagttttgcaaacatttctcaaaagtgtttatatcaatgtataccctattaacaatataaaataattccaggtactccatatgtttaccaacacttgctactgtcatcgtttttaaaaccccttttgatgtctgtgctctcatttctatattaaattataacaacaacattacatagagcttaacattttgcaaacttttaaactgtctaatatctgaatgcatattttctaccctttaatgtaagcaaggagagtcctattattatccttactttatattaggtaggtgcaaaaataattgtggcttttgtcattaaaaataatggcaaaaaccacaattacttttgcaccaatctaatagatgaggaaacaggttcagagaggagagcttgctctcatgaccagcttgctcaaggtcatgaatctggtgaatagtggagacaatgaattgtgcacatccaccatggtacatggcttatagttataagggtacatgttttatgtcggctagcttactaacagctctttgaggttgagacttatttttaatttatcactatctaatgaaggaatgaatgaaccgaaacataaaattgtaatttctctgtacataaaaattttacagtaattggttataataacataatgactaagaagcaccatcaattgttacctgaatcacaaaggattgtatttcagatccacagattcacaaatatccaaatatttagtctcatttaatgactttctttgaatattaaaggattaaaaattataagcctctgttcaaagggttattttaaactcatttattttaactattactaagcagtcttaaaggtatcaaaaatatttgggttcttaaatcaaccaaattccagttttgtattttgtgcatagaataccatagttagcatcttaatatgtgttgttttttagttgtttttcttgcatataacctaacaatatgctaagaaataaagaaataaaagaaataccaatataaatgtatgtacacagaagttttacagtcagtagctttgggtagcttattaaaagattatttgattcatttaagtcaaataatcttttaataaaagatttctaaagatagtttgacatcatccaacagattgttatgaggtgtcaataaatcagtagctatctgtatcaacaagcatgtgttttagaagatacatggcgaattacagaataatccgattactttttatgctgtcagaaagtacagatgacacatttaagcaacctgacatccacggatagttagaccttggtgtgctttataaattaccccctttcgttcaagaagaatggtaccatgtgttaacgcccacttccaaggtgaaagcgaccacagacacctcagaatatccacttcttttttgtctatgtatgttcatcttttcaaacgtgttcatatcattttatgggtctctaaaatatttaacttctaaaacttcttacttttgacctataaaaattcattaaaagttttaaaatacatttttgaggcagagattgtaaatgtaaatyacagataatcaaaataattgaccttcattatcagatacttcatatcaaaactgactttctatctgaatacttatccctctgaggtgaaagaatacattctgtctcaattactgagctcttttgggatgtgaacctagctaagtgtgcactgacacattccaaggcgaccacacaattcatttgtggcatactaaggtatttacaactcaagcctgctgtaagatacaataaattcataggatgccaaaggtttctgagaacttcctgtaattcacaggacatgatcagacataatgaaatgtgtttaatacaaatttctgtcttatattcaaggccaacttgagtttcagaacagcaacaaaaagctatgcaagtaaatcctctagatataatcattcaacagttttctcaaggaaaaacatattatagatgtttaattttagccatataccttttgaacttgttttctttcaattatagaaaaaaaattcacttttcaagttcaaacatgactgttaaaaatatatcatgytcccccagtagcaaatgaacatacctctcatgcatgtagtcaactcccagcagcagctggataaaccattctattatttgattttctggaaagatttttccagcttgtttatattcctgaattttatcgtccagatctcggccctgaaatgaagagcataatctttcatattttttcagctaatatgttaaaatcaagttcacttaacaacagttaatacatagcagtcactgtttataagaaagtgccattctgtaattatcactgacaaagattctctctttaatcaaagtctatccaggttcctttgagcactcttctcagctcggcctcaacattaacctataaagactttaacaaacacgaatctattaatagtttctaaaagcccaaggccacaaccctaggatggtcctaccctcctaccccttaaagttcctacctgagaaaactcaaggtagacagaagaattgacagtttcttccagccaatgcctgaagatagggctcttgtctcccaatctctaaggaaggttaggagtctaactttgatgagcaccagataacaaacccacatgagtttacagggaccaacctccacttcctgatttttgtaatttttcacttccttgactctgctcaggcccctgctgttcctcttccctactcccttattctccctgaatacccagtcactctgcacaaattagaatggagcttagctctttcctctagtatcagtagttacttcataaaatctgttttaaatgctttaatgatatcactccaggaaaaaacccttataaggagaaaagttatcacacaaaccttcaatctaaattattttttattatattacctatatatgcacccacataaaactagcaataacttttcttacacttagagttgtatataattatagaatcttaacatataaaacttaaaaaggtcggccaataaaattcaaatcagtgatatgaatttaatataaagtgatgatttttggtgaaactaaattggcacttatattgtgcatatagctgctgtagtatagcttcttttgagttcagcatgcccagggtaccatgcgcattgggatgactgaattctcctttcctctacgtagctatagcaaaaccctaaggaatataataactgtggatctatgtggggatccaagcacatcgtttaagcatttagttaagctctatcctatcaytcactggcaataagtaaaataataatacttattattaaggccaaaaactaactatgatcaaaaatgacaaacatctaaaatagcctggcagtgtctgacataatgccctttctgaatatggttgtactgatgtatttcaattgctataaaaataaaaatgtcaaatgctaaattttcttagagaacccttagacctgatccattttactgtaaaacaccgaaaacttagagataatttgagaaatgttcctctaaagaaaaggatggattcaatgttaactgtgtttagtctttgcaggatgcaaaacacaggccccataaagagtgggagaggtccttatcatattcatggggagcaaaagtggaaaaaataagctagtcatagactactcatgacagagttgttgttaagatgcaaaggaagaacatttataggcaatgagacaatccaaaagaaattacttctaatgaaacaatatgaggtcaactgattcacttctaatgcaytttttatttccttacagtgcaatgtgcaaatatttgcttagcattttctctcctayacagggccgtaacaaatcaaaagtatagcaaacattcactagcagcctagctcaagtacggtttcctgatagtttttctgggccaaggagagtgttccaaagcttggtggaattcaaaaatatrgcgaattgaatacttaactccttgtctaaaagactatcatttctttctcattcttcaaacctgcctttatttcttctctctttttactccttgagtttatcagaattctgttgagccatacaagctgtactctcatgtttctgtaagttgcaaagaacatttctgacaatagatcattataacatcctgtgtagcagacatgaaagtccttcagatgaaaggtgacctgtaaacatacagttgacccttgaataacatgggtttgaactgcgtaggtctgcttartatatcagtttacaagcttataatatcagcttctaaactgatatttttcaaccaaacacatattggaaatacaatatttgcaggaatggaaatctgcatatatgaagggcttttgtatatatgaaggttctgcagggccaactgcaggacttgagtatgcgaggattctggtatatctcatttagtttctctgaacacgataaaacatctccagtggcagaaagactattgcctacatgttgccatcttcttcctgaataccttcagargaggagtgaaaggagagagaagaggatgaagacaatgataaagaaaaaggaaaagaaaaatttgccttaaagaaatatcagtgaagctacctgctagcttcttttttttttattttattattattatactttaagttttagggtacatgtgcacgacgtatgtcaacccaatgtatcgctttaaaaacaccaaaaataagcacaattttctccatgtacaaaaattatggtcccagaacctgtgcatttttttaaaatgtgttaaccttactaaggacaagctagaattacagtggccacagtgaagttttaacccagataaaattggtyacttgtgaggcacattagagaagaaaggatccaacataccacaaaagcaatgggacacactctttaatggatacacagaagtattaaatatctaagatatgaaatgaatcaaagatttcctctttaaaagattccttagagaaggccaatggaaaaaatcttaagtcttttctacaaatatcagtcaaaagctttagccatctgggtgggtaatcttgttccatgggccagaaaaaaattcacttccagattagtgagctttgtgttattgtacttggcacctggctaaaatttttaaatgaatactacaagatctgtttttatgtttatatttatatatgtcagtatgtatgttatgaatgtgtaacatatttctttttctttatggtattgccaaaattaagttgtaaaagagaactatttaattggtttaaagaaaaataagtgcttatataaaataggtattccttaaamccttagaaacaaacctaaaatatttttcaagttgacataatcttggataatcttcggtaaatagtagctaataaaagtatattggcttgattaatgcaggcataccttcagagttgtcggcatttagtataatacagatgcacaactcttctcccctaggtttatttagtaaaataagttcatgttatctctatgtgacatagcttgtcagcaagaaaaataacttaaggtgatggctagctatttaatgtctcatctttatgagcatttcaagcataattgttaaaagcaagagtcaaatagaggtaagatagaattcccatgtgaaaaatgtcctttctataccagaaacttttaacattcttacgaaggatgggaaaaaaaaaaaaaagccctaacaggatagaaataaaaatttgtttcctctacagtttcttactacagagagactaaagacagttgggactgttaataaatgttctgtgccacattgaaaaaaatgtattataaaaaagtayatgctcctagaattataattcacaggttttccaatctatagactgctggcatgatattcacacttgcttgcttcctagwgttcactagaaattaaggtcataaagggctaagaattctaattaaaatatgtaactaaaattactagaaataataaggaaaacaactttatatgcaagtatacaatataggtaagatgtgcttttggtaaggaaaagcataagttatgaggatgtgtattgttctgttaaaacaaaaagagaataatttttgttctagagcagaatgattgatccaaaatgagaaagaactatttggggaaaaaaactgactggatattagaaagtaatatggtttagctgtgtccccacccaaaatctcatcttgaattgtaatccccataatctccacatgtcaagggcgggaccaggtggagataatcaaatcatgggggtggtttcccccatgctgttctcatgacagtgagtgagtctcagaagatctgatggttttataagcatctagcatttcccctgcttgcactcactccatcctgctgccctgtgaagaagtgcctgcttctcctttgccttccaacatgattataagcttcctggggcttccccagccatgtggaactgtgagtcaattaaacctctttcctttataaattacccagtcttggctatttcttcattgagaatggactaatacaaaaagtctgtagaagggaaaccttgggaaagaaattttatacgtgattaagctagctaagattagacgtgctatttataaatttttctaaaaattaagcattaatatcaaaaacactatgaagggaaattagaatttcatcctttatgttaaaacaactttttcttgaggtactggtctacttttaacaggaaattgtgaaaaggttttttgtttgtttgttttgtttttaccttttaggtaattggctaaggaaatattctgcattttgtcaagataattaagaaagttaaagaaatgccatgatggctgacttgccaagatgactgactagaagcagttagtgcatgctgctctcatggagaagaggcagagctgcaagtaaacactagatcttcaagtggatcatacaggaggccatgttttgattcatcaaagaagcaacagcgacccacagaaagcaaagaagagcaaggtaggacagctgcccacccaggattggtgcagagccagaggaggctcccagctgcaaggaaaggatgagaggatgagtgagagtccccaaggaccacatgtctgcatgacctttgtaatcttgggcacaggagaggcccccggctcccctgggcttccagatcgacacagagagcttgtggagtctgtgcagagctaccactgaagcccacattgagctccatgagccttggatctctgagcaygttggtgccagctgccatagccctacaaacaaaggagctcaggctctctcgtgcacctctaggataggtaccacacgcacggtgctgaggagaggatgaactgcagactgtacctcatcaggcaaggtccaatcacagccaccccaccccaatctgaacattccagctggtcattgctcttctttcctctgggatggagctcccagaggcaactgacaagcctgctgcaattgccactgctacagcccctgcccctgctgtcctcaggctggggagagagtaaagaatctaagaactgtcattggcctccagaatgccacagctgccatacagtaaggcagccagactgttttccatgcagctctctgaacttgctgctcctgattgggcacggccttccagcttaggcccccagagcagctgtgccactcccacctgatcagttagtggtggttctgcatttctctggggtggagcttccagagacaactgacaggccctctgtcactgccaccaccatagtacccacccatcacccccaacacccaggctagaaagggaacaaacagcctgattgttgttgcaggcctatagcacaccacagccatcctatggagaagaggccaaactatcttcttttgtcttccctaggcagagcccccaccccacctactyccaagcttgggcccacagcacagctgccccatccctagctgatcactcaaattagccatagctatgcatttctttggggtggcaccccctgaggtaactggcaggctgtatgccattgctgccactgcagccccacctctgctgcccccaaggtgggsaaggaacaaaaaccctgatctctccccagggctgcagtgcatagcctaggagtactaaggcacttgagtgggaatggagcccacattctcagagcactaagagggttgagtcacgtgggttcatgggccgcagcaggaataggcatgcctttctccacagagccagactgaaaaggtatggtctatctccctacttcagcctctgactgagggaaccctgcagcccaaacatctaacaaaagaaatgcaggtacagtgccagtgattggaaggagttcccccaaggcccaggagtaaatgcagtgaaggggtcacctctcttgccactgcaccacagagcaagcttgcaagtggcaggaaatacaaaggagccatgcagcagagtaagagcctctaccagcaaatacgcttaagcttcatctactggattgcagcccaaactacaacaacaaaaatactttgctaatataaccccctataagaccaagggtaagaattcagccacaaataaagaagctgcatagagcattggccctctgaaaacatccagaaatgaagccaactaactatactcaatttacaccacaattaaaggaacgccaaccttctcagatgagaaagaaccaactcaagagttctggcaatgcaaaaagccagagtgtacccttacctccaaacaagtccactagctccccagcaatggtttttaaccaatcaaaagtgactgaaatgacagacatagaatgtggactctggatgacaaggaatctcatggagattcaggagagagttgaaacccaacccaaggattccaaggaattagtaaaatgatctaagagctgaaagatgaaatagccatttaaaaaagaaccaaattgagcttctagagctgaaaaattgactacaagaatttcataatataatcaaaagtattaacagaaggatcaaagctgagaaaagaatctcagagctcaaagaccagttcttcgaatcaactcagttggacaaaaataaagaaaaataatttttaaaaatgaataaaacttctgataaatataggattatataaagagaccaaatctatgactcaatggtattcctgagagagagagaataaacaactcagataatatatttgaggatatagtccatgaaaatttccctaatgttgctaragaggatgacatgcaaaacgaataaatacagagaaccttggttagacaccatataagtcaaccatccccaaggcacatagtcatcagattcaccaaggtcaaggtaaaagaaaaaatcttaaaggaagagagaaaagtcaattcatgcacagagggaaacccatcaggctagcagcaaacctctcagcggaaaccttacaagccagaagagattggggtactattttcagcactcttaaataaaagaaatttcaaccaagaatttcatatctcatcaaacaaagattcataagtgaaggagaaataaaacccttctcagaaaagcagatgctgagggaattcattttaactagaccagcctcacgagtggtccttaagggagtgctaaatgtggaaytgaaagaatggcacctgctaccacaaaaacacacataggcacatagcccacaggcactgcaaagcaatcttaaytctacataacaaccggctaacaacatgatgacaggatcaatatctcacatattaataataaccctgaatgtaaatgagctaaacatcccatataaaagcaaaagagtggcaagctaacacccatctaacatgtaatggtacacacgggctcaaagtaaagggatggagaaagattcactatccaaacaaaaaaacaaaaaagagcaggagtcactattcccatataaaataacccagattttaaaccaacaaaaattaaggagaacacagaaggacattacataatgataaaggyttaattgaacaagaaggcttaactataccaaacatatatgcacctagtactatagtatccagattcataaaacaagttcttcttggcctatgaaaagacttagacaaacacatagtaatacagtgaggcttcagtaccccactgacagcattagacataccatcaaggcagaaaactaacaaagaaactatggacttaacacttcacccactggacataataaacatttatagaacactccatccaacaaccacagaatatatatgcttctcttctccacatgaacatattctaagatcgaactcatgcttggtcataaagcaagtctcaataaattcaaaaacttgaaatcataccaagcatactctcagaccacagtgcataaaaatataaatcaatatcaagaagacctctcaaaactacacagttacatggaaattaaacaacttgctcctgaataacttctgggttaacaacaaaattaaggcagaaatcaaacaattctttgaaattaatgaaaatagagacacaacataccaaaatctccagggtgtagctcaacatgttaagaggaaagtttatagtactaaataccttcatcaagaagttagaaagagctcaaattaactatttaactttggacgtaaaggaactaggaaaaaagaacaaaccaaccctaaagctagcagaagaaaaacaataactgaaattagagaagaactgaatgaaactcagatgcaaaaatctatacaaaaggtcagtgacaccaagagttggttcttataaaaaataaacaagattggtagacctctagctagattaacaacaaaaaagagatccaaataagcataatcagaaatgacaaagatgatattacaaccaatcccatagaaatacaaaagatcctcagagaatactacgaccaacttacacacacaaaatagaaaatctagaggaaacacataaattcctggaaacacacaatctcccaagactgaatcaggaagagattaaaactctgaatagaccaatactgagctctgcaataataataataataaaacctaccaaccaaaaaaagtcctgcaccagatggattcacagctgaattctaccagttgtacaaaaagaactagtaccaatcctactaaaactattccaaaaaatcaaggaggaggggctcctccctaattcactctatgaagccagcaactgcctaataccaaaatctggcaaagaygcaacgaaaaaggagaacttcaggccaatatccatgatgaacattgatgcaaaaatcctcaataaaacatagcaaactgaatccagtagcacagcaaaaagttaatatgccaaaatcaagtaggcttaattaatttatttatttagagatagagtcttgcagtgtcacttgtgctggagtgcaatggcatgatctcagctcattgcaaccttggcctcccaggttcacacgattatcctgcctcagcctcctgagtagccaccagctaattttttatatttttagtagagacgggatttcaccatgttggccagactagctgcaactcctgacctcgtgatctgcccacctcagcctcccaaagtgctgggattacaggcatgagccatcatgcctggcccaagtaggcctyatttttgggatgcaaggttggcttaacatacacaaatcaataaatgtgattcacccaccacataaacaaaattaaaagcgaaaaccatatgatcatcttaataaatgcagaaaaagcttttaagaaaatccaacatccatgataaaaaccctcaacagaccaggcattaaaggaacatacctcaaaataataagagccatctatgaagaattctcagccaacatcatactgaatggcaaaaactggaaccattctctttgagaactggaacaagatgagggtgcccactcttaccactcccattcaacatactactggaagtcctagccagagcaactgggcaagagaaagaaataaaaggcatccaaaacgaagtcagctatctctctttgctgacagtatgattctattcctaaaacaccctaaagactccaccaaaagactattagaagtgataaacaattttagtaaggtttcaggatacaaaatcaatgtacaaaaatcaatagcatttctataagccaataatgtccaggctgagagtcaaatcaagaacacaatcccatttaaaatagccacaaagaaaatgaaatgcccaggaatacagctaaccatagaggtgaaagatctctacaaggagaaatataaaacattgctgaaagaaatcagtgatgacactaataaatggaaaaaacattccatacttatggattggaagaatcaatactgttaaaatagccatactgccctaagcaatctacagattcaacactattcctatcaaactaccagcatcattcttcacagaattagaaaaaactactctaacattcatatggaaccaaaaaagagcctgaatagccaaagcaatcctaaggaaaagaacaaagctggaggcatcacactacctgacttcaaactgtattataaggctatcgtaaacaaaaagcatgatactagtacaagaacagacccataaaccagtagctacagaatagaaaactcagaaataaagccacacacaaccgtctgatctctgactaggccaacaaaaacaaggaatggagaaaggatctcttttcaataaatggtcctgagataactggctggccatatgcagaagactgaaactggacccttaccttttaccacatacaaaaattaactcaagattgatcaaagattttaatgtaaatcatcaaactataaaaattctagaagaaacctaagaaatgcccttcttgacattggtcttggcaaagaatttctggctaagttctcaaaagcagttgcaactaaaacaaaacaagtgggacctaattaaatgaaagagcatctgcacagccaaagaaactatcaacagagtaaacaaatgatgtacagaatggaataaaatattgactaatgatgcatccaacaaacgtttaatatccagaatctataaggaagttaaatcaacaaggaagaaaaaaaaaaacatttaaaagtaggcaaaggtcaggagttagagatcagcctgaccaacatggtgaaaccycatctctatgaaaaatacaaaaattagctgggtgtggtggtgcgcacctgtaatcccagctactcaggaggctgaggcaggaaaatcgcttgaacccaggaggcagaggtttcagtgagcggagattgcgccactacactccagcctgggcaacagagtgagactccrtctaaaaaaaaaaaaaaaaagtgggcaaaggacatgaacaggcactcctcaaaagaagatatacaagtggccaagaaacatatgaaaaaatgctcatcatcactaatcatcagagaaatgcaaatcaaaaccataatgagttaccatctcataccagtcagaatggccatttttaaaaagtcaaaaaacagatgagtaggttgtgaaaattttctccaattttgtaggttgcctgttcactttgatggcagtttcttttgctgtgcagaaactctttagttcaattagatagcatttgtcaattttggcttttgctgccattgcttttggtgttttagacatgaagtccttgcccatgcctatgtcctgaattgtaatgcctaggttttcttctagggtttttatggttttaggtctaacgtttaagtcttaaatccaccttgaattaatttttgtataaggtgtaaggaagggatccagtttcagctttctacatatggctagccagttttcccagaaccatttattaaatagggaatcctttccccattgcttgtttttctcaggtttgtcaaagatcagatagttgtagatatgcggcattatttctgagggctctgttctgttccattgatctatatctgttttggtaccagtaccatgctgttttggttactgtagccttgtagtatagtttgaagtcaggtagcgtgatgcctccagctttgttcttttggcttaggattgacttggcgatgcgggctcttttttggttccatatgaactttaaagtagttttttccaattctgtgaagaaagtcattggtagcttgatggggatggcattgaatctataaattaccttgggcagtatggccattttcacgatattgattcttcctacccatgagcatggaatgttcttccatttgtttgtgtcctcttttatttcattgagcagtggtttgcagttctccttggagaggtccttcacgatttacaagaaaaaaacaaacaaccccatcaaaaagtgggcaaaggatatgaacagacacttctcaaaagaagacatttatgcagccaaaagacacatgaaaaaatgctcatcatcactggccattagagaaatgcaaatcaaaaccacaatgagataccatctcacaccagttagaatggcaatcattaaaaagtcaggaaacaacaggtgctggagaggatgtggagaaataggaacacttttacactgttggtgggactgtaaactagttcaaccattgtggaagtcagtgtggtgattcctcagggatctagaactagaaatagcatttgacccagccatcccattactgggtatatacccaaaggactataaatcatgctgctataaagacacatgcacacgtatgtttattgcagccctattcacaatagcaaagacttggaaccaacccaaatgtccaacaatgatagactggattaagaaaatgtggcacatatacaccatggaatactatgcagccataaaaaatgatgagttcatgtcctttgtagggacatggatgaaattggaaaccatcttctcagtaaactatcgcaaggacaaaacaccaaacaccgcatgttctcactcataggtgggaattgaacaatgagaacacatggacacagraaggggaacatcacattctggggaccgttgtggggtggggggaggggggagggatagcattaggagatatacctaatgctaaatgacgagttaatgggtacagcataccagcatggtacatgtatacatatgtaactaacctgcacattgtgcacatgtaccctaaaacttaaagtataacaataataataaaataaaattaaattaaattaaattaaaataaaaagtcaaaaaacaacagataatggcaaggctgtggagaaaagtgaatgcttacccagtgttgatgggaatgtaaattagttcagccactgtggaaagcagtttagagattcctcaaagaactcaaaacagagctattattcaactcagcaatctcattactgtgaatatacccaaaggaaaatagatcattctaccaaaaagacatatgcatgcataatgttcatcaccacactattcacaacagcaaagacatggaatcagcttaggtgcccaccaatcattgattggataaagaaaatatgatacatatacaccacggaatactccacagccataaaaacggaatgaaatcatgtcctctacagcaacatggatgaagctggaggccataatcctaagcaaaccaatacaggaacagaaaaccaaatatcacatgttataagtgggagctaaacattgagcacacatggatataaacagaggaacaacagacactgccaactactagataggggagggaggaagggggatgtgagttgaaaaactacctattgggtactatgttcactacctgggtgcaatatacccatgtaacaaacctacagatgtaccctctataacaaaaatatgtcaatttttttaaaaagacaatttcctgtgcttcgtgtggtctttataagtcttttgatcactcaagaaaacagttctctctatttaaaaagctaaggtttttctataattatgtaactttctttgaagtattttaattatcactctgcttaaatgactactgttgccagtgacctctgatcctattttaattattttaaaccctttgacattttttaaccacttctcaaaatcaagcattaaattaaggcctttcgacctcaaaccaactttggaagtttccaaactgacttctggaatttctcaaaggaattttttcctctcttcttataaaaaagagagatgttaaactaattaggcttatttgatgtgttaaattgcatgggaagcattgkcaaataataagtgttgctgaaccatctttaagttatattgcatgagtatgttattaatatgttttccagaaattatatgaaattcccagaaacttgatagtcttgacatattactatcactcgtaattttaatttttaaaaaatactgtatatacagaaaaggaaacaaaattttcttgtcaattgcattataattaattttcatcagacatttaaccattatcatttaaagtcttgccatccacagacagttaattgttttactttggtattttcctgaaagctattgaaaacaactataaacctaaatttttcaactttgaggggattcatggaaagaactctgacaacataggtttctgataaccttaggttcacacaattagattagataagaatttctagaatgctaatgaataaattgattggttcataaaaccactaaccccacatcaagcagaacaccaattaattggttgctaaggaaatgctttggcaggttttcatactaagtcagccagtactgaaattgttaagatatacaatttgaatgagctccataagattgatccaagtcaaattacctatgatgaactatttcataaacaatgctgtgtgcctgaattggagaaatcaactggtatttaaaaggatgtaaattcaatgttaagtgtgggctaatggagggcttggacagttgcttggtccttcctgagtccttaaagctttaattattagaagctctgtactccttaactcatcacaggagagagaaaataatcccaattattttaaaaaatactggcaggctgtctgttctaaaattcctaaaatggtttataaccactgtctggtttgtcaaacccataattttgacaagacaataaaacactcagatgatacatttccagcacctgctggatcatttgaatacttacagatggacatcactcaattcctaccttcaatgaatagtttctggatgtacagaagctttcccgtcatgcaggaaggttgctgatataacagtagctaaaaggttatcatgaaatgtgtttgctttatggaatactcctggagaaatttccagtggtagaggcgctcatttcactggacaagttataaagcagttaaataagttattacaaacacaatggtattaggcaaagctaactgaattgactgtattgccttgttcaaaggtattactgattgatggcagtcagatccaccccccttggaaaacacagattgaccccttataaaatagttaccggaaggtgtatggccctaataatagcacctcatgaatctcacacttttataagttctgacatgacttaatattgaaagattttaatgcattatgctaaagtatatttttaccagttaaaagaaaccctttgtgacccaccagctgatgacaactagatctttcatgatctagaacccactgaatgggtcttttggaagcaacaccagagaaagactgcccttgagcctcactgaaaaagatcataccaagttcttcccaccacccacactactgcaaaatttcagggcctcaagccttggatccctatatctcaactcaagagagcccctccagactcttgggacagtaaatccactggagatctcaaggtaaagctgactagggaagcttttctccagaagcaaatggcatcctagatgtggacagctttcccaagatcacaggtcaagactgttctcctctgtcactatgaaatctttgttccctttcctctttgttttcttttctgtttatatatggcaagataatgtgataattaagatttcataattgatagcttttgcagggaactagactgaatgttgactatgtcatgttaaacctgaatccctatatgatcttagagatattctagttcaccatgtaacaaatttcactaatattccaagggtgactatttgttcaaattgcacatctgggctaagcgcagtggctcacgcctgtaatcccagcactttggaaggcagaggcgggtggtcaggagttcgagaacaacctggccaacatggtgaaaccccatctctactaaaaatacaaaaattagccaagcgtggtggcacacgcctgtaatcctagctactcagaggcaggagaattgcttgagctgaggaggcggagattgcactgagctgagatcatgccaccacactccagcctgacagacagagcgagactctgtctcaaaaaaaaaattgcacatctggttctttccacatgattgggtttttagattcatatattcagactcttgtttaaatctaatagtaggaaaaacctatattgagggttttgcagctaaattatgccagaaactaagaaaaccaaaagaaagataagttgacagtttgtagacaactttataaccctaatcccttcttattggtaagaagtaatctaccatacaatgattcaataatggacccttggataaatattaccagtgcttcccaactggtgatttctaacacacaaagtatcacacaaggaactgtctcttgtgcccctccaggatatatttttatctgtggaggatttaatgatcaaccatatgtgtgggcaactccttgtctcaagtggaaaataagggaccaatgtggattagagattctaacagtaccactgtcacttcataagcaactggaaactgaacattgttctgtatctcttaatttgtgccatggattaacgagaaattgtgcttgctttggcagcacatatactaaaattggaatgatacagaggaggttagaatggcctctgtgcaaggatgacacggaaattcatgaagcgttccatatttaaaaacaaaaataataaagaggaactttccggcaggcttaaatcactctaaatgggcatcttttgtagaatggttcttctttggcttggcataaatgtatatagagttattattagaaatctgtctcaaatattagctactatagctgactctattgcaaaggctatcgttgcccagaatcctttataaattctcttgctaacattgttttagactgttttggactactcgatgaacatgggaatatgtatgcagtggctaacatctcatgctgccctttcataaatatgtctgatacggtagaaactcagttttaaaaagtaaacaaacaagttacttggttaaaacaagtagattcctcttctggctcatttttttgattcattttattataattgttttggttcatggtggcctctgttaaggaatacacttcactctcttagtattatcctcctgataaccatcacaatagtctccctggtgttctatattctctcaagtgtcttaaatgctcatatacagccatctgttgtacatcaaatggtctcactactgttaaaacaacaaaaacacaaagagaacataaggaatcattcaactagcctgatgccatgaattatgtatttcataccaagaccaaaaaagtccatgacgatggtgacagagtggcatcaatgcccaattttgagagactgactaatagggagaaattgttaaattaacttaaatttggcctgaagctgcctccataccttgcattcctgtgcagcaaacctcaccctaacgtagtatgtaaacaaaccaatacacagaagaaatagctgagtttcagccaatcacaggcagccaaatcatcacaccatgcccaaataaggcaaatgcctagctatagctaatcaaatgatttctctggtttgcttttgtgtccatcctataaaagctcattgctcaggttgctgggcagaaagagctctccgaactccttctagttctgaagtttgcccaattcaagaaattttttttgtgtgtgctcaaataaactttggtaaatttaatttatttaaagtttttattttaacagttataatactaaaatttggagacatttgtgcattaaaatagcattcctttcaggaatttatccccaaactgcaatgctgcttttcacatcctattgtcatttttaaactgtgttaaagaaatattaaattctatacattttatatcaacttctttattttttgtgaatgagcataattatgttttctgggttaccttgccatatggatgcatgctctctgagtgacatttattgttggtctgacaatcacctgcttacaatctttcaagtggaaggagagatgcagaacaacagaggtgggtaaaagttttatgtctgtttcctgcattgatattaagtgcctgatttcctgtaattaaataaatatatatttagactattgaaggaaaaaccagaaaagggccttcaataacaggcctcaaagtgaaatgtccaaaggaaatagccaaactccccattgccttctgggtagaactttaaaaagaagaaagatatctgtttttagcattaagcaagggctatgtgaaatcaacaggaagagagaacactgaaagattaaattaatccaagatctgtgtcttgtgcttcttaagttattcttcctatttccattttacatgtttatcctcaagaaaaactatttgttttgcatttactgtgttctttaataaacacagccagatgcaatcactcacatctgtaatcccagtaattcaggtggctgaggtaggatgatcacttaatgccaggagcttgaaaccagcctgggcaacatagcaagatcccatctctaaaaaacaattttaaaattagcccagcctggtgtcatgcctatattctcagctgcttgcgagcgtggagygggaagagcrtttgagtccaggagattgaggctgcagtgagctatgattgcaccactgcactccagcctggtgacagaatgaaaccccaatctcaaaaaacacaaaaaataaacaaaaacctctgattttttctaaggatttaattatgatagacaagtcactcaaagatttagacacaacaaattatgatttgacacaacaaagaaatacagtttttagtctgattttaactcagcaatatgaaaagcattactttctttctctaagctgtctttaaagtaaaaagctaatgtttttgatgaaatgtaatgcgttggtctaagaaattcttattacaatatctgtaagtatattctgttttcttaactttgtccttgagaratatttaatagtgacttttattgctaaaataactttcatgaaaaatgtattgactttaactgacccaaaattaatattgccctaagtctatacagctatcaaaaaatgttttccttcactaagattatcccttgaaggttgcaataaaagacttgatgttaacttctaaggttttgaaaatctgtaacccaaactgtaacatttgatggattaatagtatctcctcctttcaccatcccagttagccaatgacagattgcctttgaaatgtcgaggctttaaagaaatgaagaacaacccaaattcagtgttcttaaccccacctttgattgttattatcaaattttaaatcctaaaaggatttgattttaaaaattaatccttgtattaacattggcaatcaaagcacttacaaccttaaaagacaaaagaagagcattctcagaagcctgaatttaaaacaaaaacaaaaacaaaaaaacccctgcaatgtttaaggctaaaaggaacttcaaaaattattctgtcctgctttttattttaaaatgaaaaagcttccgttattaattcgctggactgacaacttaaaatgctcttccttcacaccctaccatatctccattaaataagcattcttccagtggacctcaaatattatgcatcaaaatcttccaagttgcttgtttaaaatgcatatccctattatcatcaactatcattatcattatcatcaataactctgactcagtaaatgcagattgggtgcagtggctcatgcccgtaatcccagcactttyggaggccaaggcaggcagatcacttgaggtcaggagttcgagaccagcctggccaacatgatgaaaccccgtctctactaaaaacacaaaaattagccaggcgtggtggcacatgcctgtaatcccagctactcgggaggctgaagtaggaggatcacttgaacctaggaggcagaggttacagtgagccaagatcccatcactgccctcaagactgggcaatagagcaagactccatcgcaaaataaaacaaaataaaataatgaaaaagcttcccttattaattcactggattgacattttaaatgctgttcttcatagcctaccatatctccattaaataagcatccttccagtggacctcaaattttatacatcagaatcttccaagttgcttgtttaaaatgcatatccctagacattagcaacaataactccaactcagtaaatccacatagacccaaggaatctgtattttcaacaagcatccttcgtgactctaggacaggtggtccatggaacaaactttgaggcatgatgctaggcaataatataaacaggccatgtacttaatatttagcctgtcagtggaaacattttgtctaaaatttgaacaactccaaaggcaaaagatgtacttgagaaaggcagggctgaataagagtcattttacaataacatgtttttgaaactctgtttcattacttaggagaataccaataaatggaggtaaaggcagtgagggaggagatcctttgtcattatattgtacaacccaaggacattttcctagaattttggaagtgcactttaagagactgcataaaacgtgggggaaatgtcaagccacattatgctcttaaaagcaaaacaagaaaaaaaccagcttctaaataggtactgaagaatgccatgcagtattatgattttcatttctaataatataaatgaacatcttgagtttagttagtatttttttcaaattcttttagagatagtgttctttttgctgaggtaaatgtagatgaataagaaatggcagaacttattcttaggtgatatgaaataatgtgaaataatgcttttatctataaagcacagggttttttaaaaaaaaaccatttgaaataaattagtgtgattctatttttaaacacttgtatttatataaattcatatgacagctaaagccttaccccaaatgtcataaactctactgggtttgcagattgctttctattagtgcattagtgcatttcttttcaatgaaactagtcttgcttttcaattgttagatttaacaattttaggtaaaaatcagtggtcttattttttattgtttttcattaaaaggtcaaaatatttcatagtttaagaaagaaagtaaatggaacaaaccaaatgactttaattttgatacttataaaaatcacaaatggatcagtttaggtatataaaaacattagacactcgtattatttacagccttccccaactggacaaaatctagacccatagaattgacacaggataaattcagggaggcctacctactcctagatggagctgcccaggaaaatcagagggccccgatgggacccaccactctgaaaacaatgcttagttccttcaatcagcagcaatcccagcaatgcaaaccactgaagacagtcctgaggtgtggacagccccaatgtgtggatgcctgatttgagttcacagtaggaaggatgatcaccaatcaatgtcacaatggtcaaattccaggggtgttcctcatctataaataaccaattctggggggtggtggtcccaaacaggcttcaggactataagcagttgttctgaagcacagaaaaggatttgtttctaatactagacacaacacacccaatatgaagttctacaaggaccctctgagaactagtaagcctggtggctgcacgtcattgccaaatttacttctaatagtctattgacacgcactagagattcaagattgcaaaactcaaccygcttacttggtttgtttaaatacttttgcataaaaaagaaacatatgaggaaatttcaaatgttccgttttatagtacaatcagttcggaaagtacttgcctcaaagttactagcaggcctattagtggttaagaatttgcggccgggcacggtggctcacgcctgtcatcccagcactttgggaggytgacgtgggcggatcacaaggtcaggagatggagaacatcctggccaacatggagaaaccccatctttactaaaaatacaaaaattagctgggcgtggtggcacgcgccagtagtcacagctacccgggaggctgaggcaggagaattgcttgaacctgggaggcagaggttgcagtgagctgagattgtgccattcattgcactccagcctggcaatgaggtgagactctgtctcaaaaaaaaaaaaaaaaaaaaaaagaatttgcatatttcttccttttggcatgaatcctcatactaaaggctgcacgacaaaatctcagaggtaaaaactagctttacttctagaaaacagccggagggaggaaaggggggtgagtaacagtgaaataacgaacaattataataactttcattattgaaaatctactaggagaaaagctctgatagtcactttttcaacattcattatttcaaatccctataaaaacaaaatatatgttatactctcttaagaaaaacgggtcagagaaatgaaataatttgctgaaggaaatggacaaagatttgaatagragatgccaaagtctacacacttcccactatttaaaaccttatctagtcttccattgagagaaaataatcatatcatcacattaaaatttgcatttgtgtacaaatagtttatgtgaatatgtatatgtattatagaaatagagatggataaagacactgaaaataattgagaataagccaagaaaaggagcatctatcccaatacccctggtcctagttctgccctggatttaacagtcagaaaatcactccactttctggggtcctgtttcttcatctgtaaaatggaattaataagcaagaatttacttctcctcaaaaaaggataggggcatgttaaaaagacacaggagccaatctgaaggaaccccattagccaaagttggaacaatttgagcaacaaaataaacagtgacggtactgggtgtaacccatataatattttaaaatccatgagttcatactaatataaataaataactgaaaaaatacatggatggaggagaagcagcagctcttccttacagtggaataccaattagtaaatacagaaagaatgagagaaatatataatcacaattaggtaaagaatagagagtaagaatcgccacaggcaacttcactgaaagagactaaaattaatgagtgaagatttgaaaagaaacaggctattattaatagaaaactctcaaactatcttacccaggatatttatcaatttcaaagggaaaaaatagtaactttacagtgaaaaaccccacaagacagaaccttaaccaagtgatcaaagttaacatcatcagtaataagatacagctggtaccccttaatatgatgtactgagaagaatacaatactactattgtagtagtcttgccaagaatatgtaacctcaatctaatcgtgataaaacattagacaaacccaaactragagacattctacaaaatagcttgccagttacccatcaaaagtgtcaaattcataaaaaacaaggcaggaaagggaaattgtcacagattagaggagactaaagaaatagaactaaatgcaatgtagaatcctggattggatcctagaatagaccaaaggcataaaggggaaaactagtaaaatattaattttcctagttttgataattatactatgattatataagttgttaaaattagggaatgtatttaactgcaaacatattacaattaaaggtgaagtactgggttcctaaatcacatcccatgcttttctacctctgagccttttatcacatcattccatttagctgaaatgtccttgctctattcttcttggcctaatctttcccgtactgcgaactcaaatagaatgctagccccttcatggttcccatggtcagaagtcatttctctctcctattacccccacagcactttaaccatacccttcccataacacataccacactcccccttgtattttagcaaytgatataaatgactcattaatcctacctgaaaattcattaaatattatcatattatctctgttatgccacacaatgactataattgtatctgacacagatctggggctcagtaatggcttttggaaagtcccttgattacaattgccattgtgaacttcaagttcataaggcatcaataaataatccagattgccaacgtattcatacacaatgagagctaraactgccaaggcaatagggaactcatctcaggttagccagcatattttttcctattagaggagacatatatggaaagctaaattaggatcagaaggttgcctgggaagcaaggagaacaagttgtgcaattttcgtgaataagagcaacaggctaaatggcttgatcataaaactacactcactacagggccagactctcttgttctcagctctgggcctcatctttgcttagtgctccaccaataatgacaaatttttcctttatgactatttgtctatttccacactaactattctctccttttgaatttttaaaattatttattttgccattctcagccctggctgcattttagaatcacctggagaactctcaaaaccctgatgcctgggccatttccgaggatcaattaaatcagactttccagaggtgggcctcaggcctcaggatttttgatagctcttcaggtgattctaagatgcagccaatgttgagaactagtactacattgataaaatttttatttacctatgttaatgtcaccaagcagaaaatagagaagtccaacatttcctgcctttttccctatcatatgttctctccaccacaaccactaccaccaccctctcctgaagatatgtgatctcacccattctctagtgtgtctactaatttaatgcctaggtttctggagatgccttgtcttcacccaaatggaagactttcaggcagtatctcacaggtctccagtgcagcacattgttaggtatatcagcacagtaaggtaggacaaaatacttttaacatatacaacaggtagaaggattcaatattttatcattaccattagtgtttgacagaaatcaggtgggaggcagctggaaccaagaggtaaagaatacatcaaaaaatatcttgagtgctaacttctttgtggttcactatgtgggtccacgatgtgatagaaaaatgaatcagaaaaagatcaatcccacatgctgagaatctgacatggctcatatgatgtaaactgtgctttgtaccatgagagataaagattctgtgagagttgaggggattgggattggggtggggagtgatttctagccacgagtttatgagaggctttgtttatgggaaaggaaccttgtttattggaaactttgattatgagagaggaggtggcatttaagctgggcctgggagtcagggtaagatttgaagatgtgggactaggaggaagggcattctcagaggatatggcctaagcaaagatgaaaaggtgtgaaactgtggaggatgggcagtagttccatttccttcctacatggaggaaaatagaagacaccaatatttgaaatattctgccattctggtagttttggaactattccccatcaaagatttggttaaatcttgaccagaaattatgagagttcagttgtctgctgttttacactcataatctgatgtatgtgtccaaagggttaggtagtagatgcagaagcctcactaatgcatttatatatttcagtcttgaaaggccccaaattaaattacagaagagggaacctggagataaagagataagccatttcaatggtagtgatagcatttttctatgaggtgcaattttggtcacctgccatttcctatactattattttaccttaataaaaaggataacaccagccctgtgccagttaagagtaaatttgggtctgatgatgagaaatatctctgttaacaagaacggagcaatctgtgcaagtcactcctcaggagtccagggaagtggcaacctgccagctcagtggcacacagagcccaggcggccccacagctgtctctcagcactgccagcagccatcaccatggcaacagcccctcccgggagagcagctcagcccactgaaaccacccatcatttaaaaatcaacacagatgattccggatgagatcctctgcaacaacaacaaaaatcttatagaactgtcccttctaagaatgtaattcagacaatatagactgtgaattagatgggtgattctcgaaattcagtatgctttgggctcatttggcaggcttgtcaaaacacagattgccagaaccccacccccagaatttctgattcaatgcagctggctggggtagaggcaaagaatttgtatttctagcaagttcccaagtgatgctgatgatactggtctsgggtcacactttgagaaccactgggtttcatactagcattgtatcactgttgatttcctgattttgattactgtactatggttacataaaagaatgtccytggtcttagaaaatactcacagctgtattatatttaggacaaaggagcatcatgtctgaaacttattctcaaatggttcattaaaaaatgtaggtagaaagataaagcaaatgtggaaaaataacaatttgggaatctggataaagggcatatggaagttcattgtgttactcttgtaacatttctggtagtttaaaattacattaaaattataaattttttcaattaatacagggaaagaaagttatagcaacatatactatgtatgtctaatacggtagcgaggagccacatatggttatttaaatttaaactaactaaatttaaataaaatttaacatccaggccctcaactgcactatccgcacagcaagtgctaaagagccatgtatatgactagcgactactatattagacagcacaactatagcccatttccatcagcacagaaagttctgtgaaatagtgctgactacagtttaaaatattctaagacatggaaagagtctttgaaaaagtcaatgtcctaaaagcagcaatagaggtagcagtaatagttataagcagtatgagtcagttgtttctaaaataacacagtttattaactgaaggaggctaaagaagaaatatgaacaaattatagcaggtggatcatagtatgcaacatatgcatatgcaagtatctgtagttttgcacgaattggtgacatatttgccagagtaaatattcaatatcactgatcacacctgacatcatcttactgattttctcagcaatccactggatgatggacaaccagatatccaaatgacctggttcttctccactcaccctccaccctgtccactttcctccaagcaaagcagggtcaagacatagatgggaaaatacccagcaaggctgaggctgacctgaaggggaatggccaagacatggaatatttcaaacttgttcagatattttaacttggctattggtttcattttgggtgatacatcagctaatgtgtaaagcaggcaaggttgttctcgctgctatcccttttccttctgagcttcttttctttctcctgtctcttcttttctctctctcaaacaaatggcaccttcaagttaggtcgagttgtccaaagtttctggcccaaacagaactgccgtctactctaaagagcatcttttttccctcatgtcttttgggctccagcaacatccaagtgataagctgacttcatcctaaagtatgaacagtaccaaattctcccaaggtgcatttggctaaccctagcttccataatattctgggagatactttttgagcgtagtcatctttgggtattctctacctgacccaagccctgtcaatcctctctccataatgtctcaggagtaaacacacagattcacactgcagctacacattgtccactttcccctctcccacttctctaagcagcttcacactcccttggggctcagtaaaatacacagctattacttggatagaactcagagtggttggaaaaactgtaaatacttcaagctgtaaaccacaaattgataaatatgaggaattcttgtggggaaaaaagccatatttccatttccaaacttccactgaagaaattaaaccatagagctggaatccaaaactcaggacatatacctctactctaaccaagcatctgttagagcatttaaatgtccgtctaagcatcagaccattctagaaggtttgcccttccccctatcaaaaaattgttgatgcattcttctgcagtaatttctcctttttgttttttgtttttcttagagatagggtctcactctatcgcccaggctggagagcgatggcatggtcccagttcactgaagccttgaactgctaggctcaagcaatcctcctgcctcagtctcttcgctagctggaactacaggctcatacaaccacgcccggctaatttttttaattttctgtagagatggaggtcttactatgtttcctagtctggtctcgaactcctggattagcaatcctctcacttcaacctcccaaagtgctgggattacaagtatgagccaccacacctggcctccaccttaaaatatattcttttttactgagtttgccaatggagggaaaaacccttccttagaaacaagttttgtcaattatctacagataatcattcttagctgcaagacatgggatcccaggtctttacagttcaatttatggtgtgataattggacttttaagatctctttacagaaggctttttaccattcagcaagtttttataaagacttccaagagaaaaggagagtctcacctcacagtactccgtgataatgcagaaattatcttgctccacaaaacttgcatggaacttgacaatggctgggtggtccagcttggagaggagttgggcttccaaattggcctgtacagtttcatttggatttagttctccaacagatatttccttaagtacctttctgagatcaaaaaaaattttaaaaacatttagagctgaaaaacacatttaacaaatatcatcaagtggtacagagccattaattaatgcccaggttgtgacctactcatatatctggtattgcctattatgacactgtgtctcctggtgggacctgggcctgttttcctgtcctgcttccccaaggcctctgacctcctcatctgtgtatcctacagttctataagggcagccatggaactaatcttgagcaatattgctggggtggcccttcctccacctctctagatgtttcagtgtctcttggtttctcttatagttatctatttctgtctgtctctttctatgtgtgttcatmcacacacacacacacacacacacacacaaacacacacacacatatatatatgtaatccatcactctgtctcyctgtatcttattctttctttgcctatctttccttctgtgtctctgcctctttctgtgtctctctttgcctctgtgtatgtatttacatgtatttacacacactcacaggcatgcttctctctctcagcttaaaattttccaaatatatcgacttaatatcaataggagcaatatttatttattttctttttaaaactatccttggcatatcatacttcattactaccagtatttaacaggaaaaattaactaaaaacattaatagagatatttagtatttctaacatgtataaatgaaagaagagctcattaaatccccaagtcattaatttaaaaattgtgataactctttgggaatagaccaaaacattatctcttcccatctaagaaaaaaaagagtctgataaacaaatcaattatagtaccaaagtgtgaactagactataggaaaaaatactttagaacaccaattatgtttgcagacacagtctgatgattataagcaagcattggcagttcattagggcaagtkctgcaggacctgtactagaaaacattttacaaaaatcttctttaggagttgctacttatgcatatcaataaaaatgtattatagtagaaaatttctttaggccctttaaccaatgcatagattaaccatcattctccagtccttcctaacagatgctgacagatgcccttgccacagggaatgcctccagctaataagctctccttggcatgcccatgaacttctgccctcccagttgagatgtatgcttaccaagtcattgtgtttattcccaagcctgctaatgccagttatgctcatcattgtaaatttatgacttcaatataacttaaatgaagagtgagcgtgaaagttatctctgctaggaaaactaagtcaaatgattaccaaaaaacttgaaaataaaaagttgcaaaaataaacagctgtcaagtaactgaaaagacagttctaaaaaggttaaaaatgtgaaaatctagtattctgaattcagattgttacagaaaataaatctagaaaactaggtcctaaaaaataatataaaaataatatatattttatggatgtagtttatgcaaaaaaaaaaaaaagatgaaggagtctctaaccagaggacattggatgctggctatacagccaaaaactggagaaaatgtacagttatatattttaagttgatgtaaatgttttaattaatgtcattttattttaaaattgtttcctttttttaaccaagtaccagcttcaatcacattggagagaagagcttctaccatttttaaaaatgtgattatgctattaacttctcagtaattcaaacaagcctctccctctgttttacaatggaagaaccgtaatatcctcaggcattaccagaggtagagctttcttcttgtttcatattcagggtctagaagttttgatattgcagtcagcacactattgtatagtattcccccatcccatttctcagtgagagactacaattaaaaaaacaaaacaaaacaaaattaaaaactcgttacaattctaagttaggaaatctgtcctagaagctgagagcctaagtaggaaaatgtagaaagtgcccttatcctattccggggttgggtaacgtttgaccttttttttcccagagcaataaaagctgggttaagtttccattctccaaaaatctcataaggaaaaccttctaatccaagatgaccattactgggaagtcacttcccctgaaatttgagtcctttaatattttattcactttaaatattctccatggtcttcccattctgaactcatctcattcccaaaagacaaccaacagcaggcataagctgcttccacaaagaggaggccaatttgcattagaaagggcagctctgcctcaggaacctcacaggcaaggactcaactatgccattaacaggtgtctttaaatgtgactgcaatacagaaagttggaacacttgtcttccttcccctaacgtgttttcacattggttttaaacagcctattaggctcctatttaataagaagtagattctagagaaatgcctgcttggtaacactctgaagaaaggctgttctatcaagaatttggtttaaaatgacctaatgttattaggagtggcatttcagactgttagtatacccaaagaagctagaaatgacatacaagacactttttttaactactgaagattacaaagcagcaggcgaagcacaaagacatcttcatagagcttttcagtaatttactgtaccccagctagcatgcagttataaaagtcacagtggttaagcatgacaatataaagtcttaccaacttgcaatattctcttgctgtgaaggaataaatgctctaaaaagcttcaggatacttatttttccttgcaaacaccaactattgtgcagcagagcatgagcaattttacatataaaatgtaaatacctgagccccgtctggcamcttgatgataaagcataaaatctcatttgtccacagtttagcagatgaaggtagggctattaagacaggtgatatctattataatctctctagctgatgcggagacgttcaccttccttacctaaaatcacgtcactgagctgacagaggaaactctcattgcatatcacttaatacgagatctgtatcagccaaagacagcatggaaacttaccaagtcaagggacagtttgtcacttgctcagtgattccagcctgtcacccctcctaaataacatgacagacatttattttatcagagcctcaactcaggagaaatttcaagacagtagcaaaacgaggcatccccggagacttcccaagttacatgctttctttctttctagcatcagtgaactgacaaactttgagaataactttggaaattcgggataactatggctaatttcattcccttgaaattggcctaccttttgcagaaatggggaagatgatatctttgagatattaattaagggttacttttctccaaattttcacatatcttttcacattttccccattcaaccagcagcatacactgcttcaggtaaaaggtgaaatcactacagaaatatgagtcaaacacatgtcttttgagtttttaaagaaaagaccaagactaaagagaaaggatctggaggaacatatgaacagtgaacacagtgaacatgtatggttgtgtttttcaaagcttcaaattgcaatgaatgctataaagttgaggtaaggatgtctgaggcctttctgatttcagagctgtgaccctgatgtgattagcagctactgtacccacttagcctaagccacaggaaattttaatttcaacttagacaaacgagtaactttttggctttggattttgcttttgtgtttttttatttatcatttgcctgttttacaaagagagattatgaaatataatcaggggttttaagatttttcatccctctaggaaggcaggaattatttttatctgcctttcttaaatgggaaggtctcttttttctaatttacaaggaaatagtttcattatagaaaaatttaaaaacacaacataaggaaaatattacccacaatccaacacagaaattatcagaattaacatttctgtgtatttccttacaatctttttgctacatgtatttcttaatagtagaggccaaacagcttacacaatttgcttactgctgttttcatgagacattattgtagcagacacttgtcatttgtggctgcccactttagacagcttccttacactgtggcagatccctgggctgtgagtcttgcctcccmtggagagataaaaacagacaaaccaaccctatgactcccagcctctcttgagcttgggtgctgatgtgtgacctaggttctgtcagtcagctgcatccacccracactttgatgtgagtgtgagctgcatcaagaaacaaggtggcacggcgtctccattttgcaaatatatgtgtcatcagaaacagcatggccctgagctcaagggcactaggtcacttcactggtgatgttctgccctctagcctgctcccccagccctcccaccactgctatgaactatctgtgttctgtaacaaatccttttctgcttaaactggcaaagggtggctgctcttacctgcacctgggagtcctgatcagtgcaattatgcatcacagaagtactttcaggtgttaccacaaataactgtaaacactttggggcaatgaaagccaaacctccaaaggtctggctcatttgggttcattttcatttccaccttagactcttctaatgtatttaaggctgcggtaattctttctccatttacatgtagatagaaattgatggtggaaaacatcctgttttaaagttatttcatctcttttaatatgatatataacttttaaaagtaaaggggcatgaaaaagatatataatggcagagagtaatatttatttaaaaaattggcacattgataaaaataatggaaaagccaggaaacaaagttacataaaggaatagctggtaggggaaaaaaaagagtagaggttagtagcaagtatactacattatactacagatggagtttcattttatttctgttgtttttccttcccttggtaaaacaaaaatattatttttatgtctgtgtcacattaaaggacaaaattattttatgggttatccccatatgccacaatatgcactgctttttgttttttaacaattaaacccgtggaactagctcattcgggggttagaactctctaattcatcttgtccattctacgtaccccgatcacaaacatgtagcagagcctttggacacagcaggggttaaaggggcatcatggtgcagtgcaggaatggcaaactgtaggtgcccatggcagacatcagcaactgaggaacaaactgccaaagactttgagacaggaaatctcacgcttctgttactttactgtctattaactatcttctatgtgccaaataccatgccatgtgctggagatataaagacgaaaaagacaaaactcctgccctccaagagagctcagtcccatggggaggccaacaagtatataaatagttggacaacttcatgataaatgctaaaatagagctgggggtgggcagtaggattcctaacctttctttgagcaggaagaaaaggcaaaatccacggwctagagcttcaggatgttcacttttgcaaatgcaaaccgctttatacttgctgcattgmcttttccctgggtggagctcaagcagcaaaataaatgaatgtatcattctttaccatttgccctgtataagtcaatatccagtagaagagtgtctgcatttgcattacctgaataggctatgaaagttaatcagcatatgactcttttaaaaaatgactttatacattrtattatatattacaatattttatatatgctgtatatttccttagagtaaacacatacatacacatacacaaaatcacactatacattatggaatgtggaattaaaatgttacagggaggaggagtattttttaagagacatataaaactgtaaaactgtcaggttcataaacctctccttccctccttgttttctttcttccttcctctccacccatttattccccattttttccaaaaaatatttaagctttacatagcaagatctttaaaataagcatgaggaaccctcccattaagccatgctttgctctgaaggactctcttcatttgggtcccctagaaggcgaaccctgagacaaggatttgaatgcaagtagtaatttgggaagtaataggaaagtggggaagtgagacaggaggggaaggaagccatgaaagggtatatcatcaagacagttatcactgagggcagttggagcttaattctgtcaagaaactctgggagctagtgtagaacattaacctcagagttctcctgcccaaagggtgaggagtaatggggctgggatactaatccaccaattcccattattcactggctaaaattgctccctggaagtattaattcctccactcttctcccttgccagagcacaggaaatcctaatggctagaaagagcactcaggcagaattgcatgtgcaggcagttggaggctgagtccatgcataagaaaatgttaagtgcccaggggatataggcaggaccccaacactgtcttccacaggataaaaataaaggaaattcctcccattttaaattctggcccggtttccctatactcctgaagatggctagcaaataaagattcctagacaaagtaaaataaagtgcctcaaatattcaacaatgaaactgcaaaccaattacaacctatagataaattccatttactatgcttttcaagactgattttgtttacaaatattttagcagcatatgagtattacatacagataataggcaaataattaataatacagctaataaagaacaaaaaaggagtaaaattatttcagatatttttgtttggcaaacatgctatttctggctgctgtctagattatatttccatttgtggtgacaactttcatgcagtgtctcagtgctggtactataacaaatcattgcaaattgccttttagttttaaggagcagaagaggataaacaaaaattctaggagtaggtggtttgaagacaaatattgcatgaataaaaaatatctaataaccatcatgtgaattctatgacttttcccatctgtataaataagcaaaatagaaatgacttgagcacatgtctcaaggctggaaatagtgctggtgctccctggagttctctgcagagaatctcttgtgtcagtgcaagaatagagctggcgtccaaatggaccatgtcctgcatttccctagagggcttcctggaagtcacatggagaaaagataaaatgtctgaccgctgtgtcatgcaaagcccttccccaagcacatgaccaaagagttgatagccaagccaaaaaaaatgcatcagagcatgttaattcactggggagcaacaaaagtctgcatttgttcaggcagtgttaaaaaagcttgtgcatttgtgccctcacaacatgacagccatttcccccccatttctaagtcacagcctccataaaagctgctggggctgtctcgtagaagagtgragaaaaaattgcccttccctcttcttttacctacaatatgagtggattcccttcatggaggagacagctttctggaacttctttctatttacttctctaaaagttctctttacaaccaaggatgccttgggtcaattctaacttccccttaaaatcatatacagctcctccttgtccctatctttctcccccacaacctgagacaaatggtcaagcaattctatttttcttatttatacagatgggcagagtcatcgaatattgtggcctccttattgtgagaaacactgatgactgcctaccccacacagtcatcccccaacacccctaccatcatatgctctggaaaggaggatcctcccctagttcctgtggtgaatcataattggtctggaaaagatgttcctcactgataaaaagagaagcatgagaggaaactcttctttaatccacctctgcatgtgatcatctgcatktgactccttgaactatggcagccagctggagccatgaagtaagccaccctaacatgagtggcagaaacatggagaggtaagagagaaggccccaacgtccctgatgatgttgctcagctgctgaattagtcaaaccagaattgctctctctctagacttcttgataggaggacaagagtttcttattgtttaagccattttgatagcatcagccatttcctgatactaccactttgctacaagaaggaagaggagatgtttaaagaagaagagattagaatcaggggtagagaatgtagtacagtaaatattccactcatttgtaaatgcttaaggttataaaaacccaaatgataaagttatttaggtatagctatgctgtataaaaagattagaagaaaggtaagccctttgagaactgggctatgtcttacttacttagaaagcagttaatgagtctactaatttaaacaaaaaatgtataacttggctcttttctatttgagcattgatatgaatcttttaaaaatcatgacaaaatgaactacagtgaactacacagaaatgaacctattgtgagaaaaaaaactgggggataaatgactaaaaattctttgttattagtacatttcaaaactaaaacaacatgatatttgtttaatttgaaaacataattcaaaattattttatataaaattttttaagttatttaaaaacatcagaattcaaaattattaaaattccaccagtgttatccttcttcccttaggtgatgatatagaagtaataatagcaaacagaagataatctaaaatgagaggcaagaaagaaaagagtgaagcaaggggaatggatgattcgccaatcaaaaaatataaagattttaaaataaatactgagttgaaaaagaccaagaaaaaaagaattcttaaaatatttggttttcactctctcctgccaaaaaagaaaagaaaaagaaaatacactttacaaacagtaataaatatacctttttctatagttctctagtgayaggagataaaaaagtactaaaaatgcaagtttataaaaatttgcttgctaacatacttgctggaatagctttgatctggaagctgaattacccgtgggagctgataataacattagcatagacaaaaaaatggcagatattcatacctgaaaaaaaaggttttgctctgatgtttcacaatatctcagagaaatgataatacccattgtaatggcctggcccaagagaagcacaaagctaccaaattttcttaatgtgttccccccatattcagcttcttttccagttttgaaatggattttatgtttttgtagaattttaaagctggacaagaccctcagaaagcagataatcaaagtacctcaatcaattgaagtcctgggacattaagcaatttatccaaggtcacaaagcaagttacaatggagccaccatttacctcttgaaggaggaaacagaccatcaattctgaagaatagacttttgtctccagatttaatggttttccctttctgctgttagtatagagatcttcagtgtctaatgagtaagacagtctaaaatttttcatttttcaaagaacaaaaactcctgacatctgctttcttcccttccctagcattaaagaaaaaaagaaaaaaacaaaaacaacttgtcgttgtgattggaataatggttttgctttcgatgaggcactaatgaccctatgtctgttcttcattatcatttgagagttacagaaatctcacggaagctaggaatattgccaattatagcaccgcagatttggaggtttgggaaaagacatcatacagaagagggaggcagtgtttctcaggacttactctcctaacaaggtggtgaagtctacattttgaggttgttccaagtaccacaaccctgmaggtataattttgtgtgtttgagggccagtctttttaaaagttcaactgagcaaaattcattgatttaaaattgttaaacaatggaaaagtagtaatatgccttaaaaacaaaaataaatattgataacataagactctaggcaacaaatcactcattcactccattacgctttgagaagttctgagcttacagcaaagatcctacttatgcaggcgaggaaattaaggagcataacaatgttaataaggrtataaaaaaatttaccacagataatttggttagcttctgttacaattattatatgctccaaatttaaaattagtgttaggttaatattcaaaatgcaatattctaatgaataattcattccaggtttgtattttttttttattatactttaagttttagggtacatgtgcacattgtgcaggttagttacatatgtatacatgtgccgtgctggtgcgctgcacccactaactcgtcatctagcattaggtatatctcccaatgctatccctcccccatccccccaccccaccacagtccccagagtgtgatattccccttcctgtgtccatgtgatctcattgttcagttcccacctatgagtgagaatatgcggtgtttagttttttgttcttgcgatagtttactgagaatgatgatttccaatttcatccatgtccctacaaaggacgtgaactcatcattttttatggctgcatagtattccatggtgtatatgtgccacattttcttaatccagtctatcattgttggacatttgggttggttccaagtctttgctattgcgaataatgccgcaataaacatacgtgtgcatgcgtctttatagcagcatgatttatagtcatttgggtatatacccagtaatgggatggctgggtcaaatggtatttctagttctagatccctgaggaatcgccacactgacttccacaatggttgaactagtttacagtcccaccaggtttgtattttgaatattacagaaaaatacaagaattgcagatttcaatgagacaatcagatgacaataaaatcaagatacagtaacaaattgagttttaagaagcaacaaaagctgattagctccatttccttgagtaggtaaaaatgagaaaagataaacactgtttaaagtaaaattaaattataatctaggcaagaagttgtttaaactaataaactaaaaataaaaaataaaaaaatctagggttttaatgaaataaagttctttaaccttgtttataatagcagtggtttggctgtcttaacagtaagacagccaaaatagcaaaagtttataattctaaatttcaatctctatttcatcatcatggcaagtgtaatatgcaggcttgagctacaactttttaactataggataaagccagttgttactgcatttaagtttgagatggaaagggaagaaaatgaaactctgtataagcatacttcccttagagggtttaaacactgattctgggtcttatatttttgctgagttgtgcttatacccaaataaaagtctatttttgtgcacctaaaaagtcagggcataacctaccaagacagatcaaaggagaatctactactaggaaggatctagtttccctgaatgacagcttatggatttagtcattgatttgtaacacacacaaagtcacaaagcacttgctacagtcacagagatgctgtgtggtttctcccgcctgcccaagttgtctacaggagctctgcagcagagacatcctcctcaggacataatgttgagtaagggacactaaaaaaaagaagcttgggcgtggttttctatgagttttgtttctagagattctggaatctgagaataagtcaaaatattttcatgttaatatgatcaaaggaaaacattagaatcaaaaagtgtgatacttgaatacaaagaagggacacagggtcttagagcagtgcttcttgaattttattgtgcatacaaatcaccacaggatctgttcaaatgctgcttctggttcagcagctctagagtggggcctgagagcctacatttctcaggtctcaggtgatggctgcagctgcttgtccagggaccatactttgagtagcaaggctgagaacaggcaggggtctggaagactgccagggctaaaagtgttgaagagccccagtgttctctagaggcttgggacagagggtggatttgaagagcagaccaacagacagggactgtgtccccctccatcccccaacctactcacccctccttcccagcaaccttgaaatctcatttgaaaacaaagaactgggaacagctgctagtccagcttcatcatcttacagatgagaacactggaactcagagaggccgcargagtggactacatgccctcctgagaagattccacagccaacactgatatgaccccaaaaccgtccgttttaaaatactatgaagaaaatcttccttacattttaacccaaattctttaaactatagtttgcactggtttcttcttgttctgttcccagtaatgataaagtacagctgcccaatgaccctttgaacatctcttattayataatttattaccttaatgtatttatactcagcctcatttcacagacaatttgacataacttacataatacaacaaaaaattaagaccagcaagaatagaacacaaatagggaaaagaacacaaatatgctggccagaaattattgctatgattgagcttcaaatttaattccaaacttcttgaaaggtatttttattattactattagtactattgctgttgttgatggtaatgtgatacaattcttgcctattacgaggggtatttcaatctttggatccygagtgtcataagccagttttaattttagtcacataacagtgaagaygtttcccaaggagaacatcagtggttctattgaatagaattcattcagaaacagaattccaacttacatatgaaataatgcactttgatgtctaacttaagaaaagcttctcaactattaccttaattccagtttctaaattcagtgcacgtgtatggggcacctgatctgtggaaggtactttacttgtcacaggcacagcctctgccttcaaggactttgcaatccagtggcagagcagagacaaataattaaaagctataagaaactgtcatgcaccttaaaaggatgaaatcaatatcctaaagaggtaatcaaagaccaagatatgagataatcatgagaaaacctctacccactaaaatagtgatactggtgatgattatggcaatagtaagcgccatacatgagacagttatttggcaccatgtactgtgctaggaaactattaaaatcctcttgaaataaagaaactaagacacagagagattaagacacagagtctgttaagtgacaaaccacactcaataataatgaaactgagatcccacttgtaaatcctctttttcttttctttyttttttttttttttgagacaagtctggctctgtcgcccaggctggagtgtggtggtgtcatcttggcttactgcaacctccgcctcccaagttcaagtgattctcctgcctcagcctcccgagtagctgggattacaggcatgtgccaccatgcctggctaatttttgtatttatttttttttagtagatatggggtttcaccatgttggccaggctggtcttgaacttctaacctcaagtgatcagcccgccttgacctctcaaagtgctaggattacagacaggcgtgagccaccgcacctggcccccacttccaaatcccgggcatctaactatctcacccctatgggatgctgccttctgagtttatgaagtcaaagtccaatgagcttcacaacaagaacacaactcaaaaatacatctctgcacaaggttgatagtctgaataatccggaaaaaaaagggagaggtgccctcctgccctccctgtccccaaggcacatgtacatgttccaatttttatgagcagtatttttcaaaaattttacagcaataatcctgacacaaatygctggcaatattgaagaactgmtgattaaacagatggcttgtgagaatttaaaatataaagcagcggccagcaggagctcacatgggcttatggagaatatgccaaattaacctaatttctttctgtggagggttgattggtagatcacagagaagcaattagttgtggtatatcatgatttcagcccatctgataaaaccatgttaacatgtcaaagagatgagtctgtgatatccttttcatacaggagaaatgcagtcttcttgtggattcatagctggtcaaacaagcagaccaaatatgctggactcttgtgtcttaggccatttttcaggtggtacttcctaatgccattgagatccctaacaatatcctcacttacattttattaatgacttggatgaaaatctaaaaggacacatttaccaagtttgtagaagacacaaagccagacagcataatcaataggcataagggaaattcaccttttcaaaatgactgaagaagctgaaacacgagctggaaatcaccaagactaaattttgcaaactaaaacctgaagtttatagttagagtcaggaaaatcaaatcctcaaatctaagatgagtgacacctgacttaacagcagaacagctcatctataaaaactctggggaaagtatgtgggaaggggaatacttcctcccccaccaccccaattcaatatgaaacagtatgtgactgctaaaagagccaatattccaggctgattttgaaatgtatgaaagattttagtatcattacacttggttccatcatacccctggtgttcaggcctcatttcaaggggaatatggtcaccaaagttagttcaaggaatgattttaagatgttgaggggtcttaaaaccaagttatccaaggaatagtcagagaaacaaggagatggacagagctaatgtatttcaaggaataacttgtgaaaatgtgctaggaatgttttccttgtcattcatttaagacttacaaccatatagaatcatccttattttccccattttacagataagaaaactgagactggtagtttaggtaattgtccaaagtaagtggaaagactgagatataaatgcaggaggtctgactttaagaccaaagctctttctactcattgttaatgtaatctttatccagcatttaaattttaataataacaagagaaagcagactagcaagggcatgataactgtgttgtaaagttccttccttgtacatgccagggttttcatgcctttgtgccttcacttatgctattccgctgtctgggacacactgtctctaccctttctctgccagatttatattcattctgtaagtttggctccaacgttcactcttccagaatgtcttctctactctataaaaatagaataagcacatctccatctagcatgccctgcaaggggttgaaaatgcctatttacattcttgtttgcctgactggtccataagctctttgaaggcaagagctatgtccagtttagtttttattttttgttactaacagttttattgagacataattcatgtaccattaaattcactcttttcaagtgtacaattcagtagcttttagtatatccccagaggtctgcaaccatcaacactgtctaattttagaaccctttattatccttattatggattgaattgtgtccccctaaaattcatatgttggtctcaacccccagtgcctcagaatgtaactgtatttggagataaggtcttgaaagagtcgattaagttaaaatgaggccagcagagtgggccctaatcctatataagtgttgttcttataaggagagggagagaccagggacacgcttgcacaaacacagaaaggccatgtgaaaacagagcaaggaggtggccatctacaagccaaggagagcagcctcagaaaaaaatcaccctgctggcaccttattcttggactttcggcctccagaacatgagaaaataaatttctgttattcaaaccacctagtctgtggcatttcattatggcagccctggaaaactaacacagtccccaaagaaatcccttatccawcagcaatcactacccatycccactctccmtagcccctggcaaccacttttctttctgtgggtttgcctgcttgatatttcatataagttgaatcatagaatatgtagtcttttgtgactgtcttcttccacttagcatattgttttcaaggtttatccagactgtagcatgtatcagtatttcatggcttctcatggctaaataatattctattgtatggatataccatattttgtttatccatttatcagttgatggacacttgggttgtttctaccttttggttattatgaataatgctgctgtaaacatttgtgtacaaggttttgagtggatatatgtttttatgtcttttgggtatgtacctaggaatggaattgctaggtcatacgggtaattttacacttgtagtaaatttcctggctggtgagttactctatgatttcctyaagctcaaggataatcatttttcaaatactacttttatgtcactctcttgctaaagatcttctcttgtattccccatcagacaaaacttattaagcctccagttcaaggtattctatcaactggaccctatctatcgggactgtattaatcattattcccaaacctgacccatccacctcctctattcatgatcctatctctgtatcctttttcttgcttctgtttcccactctgtccccttcctttctactacatctgagaaaaaggacagttgccctccaagagttgtcttgtattcaagactcagaattcagggcatagagaagatggtcctggaatgaaaaatactctgctgaattatcttaattaaccacagagtaaggggcttgggttagatgacgtaaaagctccattcaggctagatgcagtggctcacaactgtaatcctagcactttgtgaggccaaggcagaagaattgcttaagtccaggagcttcagaccagcctgggcaacatagtgagaccccctctctataaaaagtaaaaaaattagctgggcgtggtggcatgtggctgtagtcccagctacttgggaggctgaggcaggaggactgcctaaccctaggagtttgaggctgcagtgagcagtgattgtgccactgcactctagcctgggcatcagcgcaaaagtctgtctcttaaaataacaaaaataataattttttaaaacttcattcatacctaagattctctgattctgttgagagattatcttcatcagctgggccaacactgccctgagatccctttacttccatttctcttgcctagctttatgtagttgattacagtgaatgcctgagtctcctactacagcattagtggggatcggttggagcctggaactggccagaatagaggagatgatgtggtggttcctttcctccttgacagtcagagctgtggagtcacatctctactagcaccacgacttgtttaatcaggctgtggtgctaaatctctaaaacacaatgctgagtgaaggaagccagacgaaaacagtccataccacatggttctgtttattcaaaacgctagaaaagacttacctatagtcacagaagcatatcagtatttgcctgggtttggggtggaggaagattagaaggagcacaagataactttttaagggtgtaggaatgttctatattttatttctggtggtggctaccacagtgtgcaaatttgtcaaaactattagaaatgtgtatttcaaatgggtatcttttattgtctataaaytattcttcaacaaagttggtttcttaaaaagtcaggctacagtaatgagagggcagcagaggagagaaagtctgcaaaggcatttttagcctttaacctggaaggttctccggttcagatcacaaggttgaataccttgtttggtgatcagagttccagggaaaataggagctgccatgtacatctattcccaagttacacaacaatatgaaaattactccacaacactgtagttatactgctacacacatgttctgtcaccctaaatcrtgttccttggtatrgggaatgttgttgcctaacaagttttgtgtgcctcagctcttcccctaaaatgtaagctcctagaggagggttttgggttttatttgttgtttgttttttacttgttttacttgctctttggtgcctactgttactagtgcccaytgaattcattcgttatcaactcagttatcttttgattgaacatggtgtacgctacagtctgatgccctggactcagaattgggtgctgatgacatcaagaatgaggggcctcaagaaggccactgtggtggtagcagaggcagcacgatggagttcctaggcagcagtgccatgggccccagcaccagtgatggcagggaggttgtccttagtctggccctccagaaatccttggtgaatctgtgacccacccattaaatttataataaattccttttgggctccggtcaatatgctaagtcttattttgttgcttggatccgagagacctgataagataacagaaaggaggatacatatgtattagcagtctttaaagtaaattactttgtgtagaactggtgaaatcttgttttccctttctcagagaaaagcaagagtagggaaatgaaacagaagtaggaaaaaagtacacactgtccttgagaagagactttgtcattttatatatagccaacaccgagatacactatctgatcataaggcagaataaaaattagatggggtctaccaggtatagaaatagcataacatccccagaaagactacatcctgccctacctgccctacattctacccaatgcaagacttccttctgtggcagatgggccagctaaactcaacttgacaccacttaatgaggcaatgtgctcctgcctgtgattcttgtctgctagtcccacttctgcagtctagaacagcatagatcatgtttacctctgaatayactgaagctcttcagatgtttaaaaaatctttagttaaggcaatgctactcaaacttcagagtgaaacaggacccccaggatcttgtttaaatgtagatctctaggcctaagtgtggaaagtttgatctatagcaggtttcagctgagttctcggagctgtaggtgattctgctacaagtgatttatgactttcatttttgagtccctacagtatgcccagttctggatgggggactgggaatataaaaacaaacaaatacagttctccaaggaagatatacacatggccaataagcacattaaaaactactcagtctctttagttatcagggatatgcacatcaaaaccacaaggagaccactttacacatactacatactaggaaagctagaatcaaaaggacaaatgataagtatcagtgaggatgaagagaaattaaaaccctcatacactgctggtgggaatgcaaaatggtacagccactttggaaaacaatctgggcaaagagaagacagtcacatgtgatactgtttaccagtcttcagaattatgaatgatatctacccaagaaaaggatattttccatttgatttgctaaattttggacactgcctagatactcaagtggaaattccttttagatctctgaaaatatgagattaaaaaaatggatgaaagatcaaaactacagatgtaagcttaggatcaggaaaacttgggaaagtaagtagagtgaatgtgaaacacacctatacttaatccatcatccttcaatccagagaatgttttgccagataaacttggattgaattattagaaggctagataaattgcctcgatgaaaaaagcaaccagagccagttaacaagggcaagaccaagcatattttctctcactaaaaatggcctccaatacctttatgtttaaaactccatgtgaggttatacagatctgctcaaatgagataacttcacccttgctcattgtttttagacccttagagccaaaatagttcaattattctgattgctactgaactatgtcatacatctgtcttttaacaggggacactttaactgccctccttccccatgacaatatccataatattctgtgttcaaggccatagaattggcatagtacctgtgcagtcacatagggcccagtgcttaaaagagactcacacttggattaatgctctgctatcactggcttgaaattcttaataattttttaacaagggactatgcatttttcactttgtactgtgccccacaaattatatagctggtcctgtctgtgttagtcaagcatacaacctatttataactgactcttgctaaactaaccaacctcattcttggtcactggatcaactttgcttttacatattccattaagtgaggcagggctcagttctgtcaaccctctatgtgtctgtcaatacagtaagttctctgaaagaggtgcaagatggtggttgcagatggggaagtcaaggaggctacagaaacacttaaaagaactaaaacatcatctgtcaatgcaaatgggagtcaattgtgtgcatactttgatacaagtccattaaacgcatatacttcacactatgtagatggagcttaatttggcttcttgaaagggctatatggaataattaaatgcacatatctgtacatttaaagggcatcaatgaatggtgtgcctctgatgggacttttrttacatgttcaaaaccaggttttatttgttatgggttacatttctaaagttcaggaaaatatgaatattaagtcataatagttttacagtaacatcaaaaatatgtgtaaaacacaaaaattaatgtacatatttctcctctttataacaactttattgagatataatttatataccaaaaaacctgcacacttaatgtatacaatttgatgggtttgggcatatgcatacaccatgctactattaccatatacaatttctttctgtattctattctccagctccagataaaagtacctcaaaataaaattcatagtagttttgattagctaaaacatattttcaggggaaccaagaagactgatacttctccataacataatttcaaatgtattttcattgttcattaacggttctcctgaaccacagatcagttacaccttgtattaacaatttttttaatctttcttttgaaggctcctgatagaactactataaaaccaaatgaaaagatgcttttgaagtacttaattttttcaaaagaaaaagttacactattgttaatamggaaaatggaaattttctggaatagaagtattattagctttatgaaattttacttccatttgggcyagttgcctcttctcagttacctcagttgtaaccagggataattcctgttacccagacagacttgtctgtgaggatgggagagctaataggtatgactatcttagcagctaaaattagggctgatttccctctcttgtctatactgtattatgaatctcttaagggaactgtgatatcttgaggcataaagttgactgtagtatgaatctcttaagggaactgtgatatcttgaggcataaagagatgaagataagtcaatgggttgtatttacataaaatacaatgacatgcagtatctagatattacacccacagctttcttttagtcctcagcctaaaggggagattcctcaatgtccaagcarctctaatctggggctggtatcgctctctctaaaactagattcaatgccatccccatcaagctaccaatgactttcttcacagaattggaaaaaactactttaaagttcatatggaaccaaaaaagagcccgcatcgccaagtcagtcctaagccaaaagaacaaagctggaggcatcatgctacctgacttcaaactatactacaaggctacagtaaccaaaacagcatggtactggtaccaaaacagagacatagatcaatggaacagaacagagccctcagaaataacgccgcatatctacaactatctgatctttgacaaacctgagaaaaacaagcaatgggaaaaggattccctatttaataaatggtgctgggaaaactggctagccatatgtagaaagctgaaactggatcccttccttacaccttatacaaaaattaattcaagatggattaaagacttaaatgttagacctaaaaccataaaaaccctagaagaaaacctaggcactaccattcaggacataggcatgggcaaggacttcatgtctaaaacaccaaaaccaatggcaacaaaagccaaaattgacaaatgggatctcattaaactaaagagtttctgcacagcaaaagaaactgccatcagagtgaacaggmaacctacaaaatgggagaaaatttttgcaacctactcatctgacaaagggctaatatccagaatctacaatgaactcaaacaaatttacaagaaaaaaacaaacaaccccatcaaaaagtgggcaaaggatatgaacagacacttctcaaaagaagacatttatgcagccaaaaaacacatgaaaaaatgctcaccatcactggccatcagagaaatgcaaatcaaaaccacaattagataccatctcacaccaggtagaatggcaatcattaaaaagtcaggaaacaacaggtgctggagaggatgtggagaaataggaacacttttacactgttggtgggactgtaaactagttcaaccattgtggaagtcagtgtggcgattcctcagggatctagaactagaaataccatttgacccagccatcccattactgggtatatacccaaaggtctacaaatcatgctgctataaagacacatgcacacgtatgtttactgcggcattattcacaatagcaaagacttggaaccaacctaaacgtccaacaatgatagactggattaagaaaatgtggcacatatacaccatggaatactatgcagccataaaaaatgatgagttcatgtcctttgtagggacatggatgaaattggaaatcatcattctcagcaaactatctcaaggacaaaaaaccaaacaccgcgtgttctcactcatagatgggaatcgaacaatgagaacacatggacacaggaaggggaacatcacactctggggacagttgtggggtggggggaggggggagggatagcattaggagatatacctaatgctaaatgacgagttaatgggtgcagcacaccagcatggcacatgtatacatatgtaactaacctgcacattgtgcacatgtaccctaaaacttaaagtataataataaaaacaacaacaacagaaaaaaaaaactggaagcccaggacaggagggcttgcccctgtggctgcatccctatagacatagagggcatctgctttgaccccctttgttatcttctctcaaggcagaaatgggaggcccttgatgacacaactgtacatcaggatgcacagagcaagtttctctctgttctccactagaaccatagagaacaagctggcaatgatttctgaccaatagggatatgacacagggagtttcaaacattgtgtgtttctctcactagaacatgtagcatatcttctgaaagaaggcactctgatcttggggtaacactgttaagaataaacactagtcactgaacatcagaaccatgagctccccaggagaaaccaaaatgagagtgtctggatgcttttcggccccaagtggatgatttccctgaggtccttcatatctaaccatgataagggaaaaacacagtgagtgtcctgacccttgctagaggaataaaatatcttcaggcactgcatgaagctgaaatctggaaaacacagtctctctgaaaacacctaactcctaacataggcaaggagaccatgtctacaaggggagagatggggcaaccatctagatctctctattccaattccatagcgcccattcatyccagtgtgaaatctcttcagcagagcagaaacacacaatgaggcagagacagacagaaccagcccagagacctgaaagtgaaagtcttcactgatctcaaggcagtaaaatgaagcccttcggaagaaaacccaagtaccccttctccccaccctcattcatgccttactcccctgtaaaatggttccaactctccagaaaaagggaactgattaacacacagtatacttggtctctttgcactattgcccagacacagaaacataaacataagtaagaatactgtatcctgctactggaaaaacaagagctttagtggtaaattttgctccaaaatctcttccaatgatctttcattttgggtgtttttgtcagactaaatatttactgctgtttaataccaaacgtaatatgaactaccaagtagcatttaccagatatacactcaacactccttatcctctttccttatttttatttcatgacgattattatttttaaagacagggtctcactctgctgcttgggttggagcgcagtggtgcaatcatagtttgctgtagcctcaaacttctgggctcaagtgatcctttcacctcagcctccccagtagctaggactacaggcatatgccaccacatcctgattttgtttttggtagagatggggtcctactatgttgcccaggctggtctcacactcctggcctcaaacaatcctcccatatcagcctcccaaagtgctaagaatacaggagtgagccaccatgcctggccccttatttttatctatagcctttaatcacattttagtatattatatatttgtatttattgtctatttccttccaaagcctaactagactgtcccctccctgagaacagagactttgttttgttcactgtctgaaacagtgcctgacattgtcagcaatctatccattgaccaaagactgaatgaagacattcacattgtacattacttatagtaaacactacttcctaatttttacagactaaatgattctattgcattaagcacttggctgatataaaccgcgtctctattttttactgcaggacctgaagagatagataggtcttcaaatcaaagtgacccccttcctgcctggggaacacagcaagacatcaaggctctcttgccccagggatgccatggtctagacagtttattaagacatcagccttgcttgcctgaggctagtccttctgctacatctggaaagaaaggtgaagcaagctcgcccttggatcagaaaaaaggaaaaagcagggtgaaaaaactgcccaactgtaccttagaagggtaatttcaagccttggtttcaccaactaargtacaaccatcaacctaaatgataaaacccctcccttagccatcttcagcaattccatatctaccgggtacattyattyatttatttatttatttatttatttatttatttatttatttatttagaggcaggctgtcacccaggctggagtgcaatggcgcaatctargctcactgcaacctctgcatcccaggctcaaacaatcctcccacctcagcctcccaagcagctgggactacaggcatgtgccaccatgcctggctaatttttttatttttttcgtaaagacagggtttcaccataatggccaggctgctctccacctcctgggctcaagcgatccacccacctcagcctcccaaaatgttgggattgcagatatgagccatagttcccctccatcaggtaagttgagatatccttcacggaagaacctccactccctgcagttcctctagatttatcatctgcatcaggacccatgtctctttttctcaggcctgcagatttatgaggggcttcaaatgttgactttttttttttctttgagacaaggtctggttctgtcacccaggccagaatggcatgagctcagctcactgcaacctctgcctcctaagcttaatcctcccaactcagcccccagagtagctgggaccacacccggctaatttttgtatattttgtagagatggggttttgccatgttgcccaggctggtctcaaacccctggattcaaccgatccaccagccttggcctcccaaagtgctgggattacaggcatgagccaccctgcctggccaaatgttgactcttaataagagctctaaaccgggttacaccctctgtccctaagacacactggcagcttggaaagatgttcaccacaactttaaatgtgtgtcccatttctgggccaccccaagtctaatacactaggaattaaaatttataataatcttgtcagttgtgtagtcacattgtattgaattttggtatgttaattttttgtcaaatgtaaatatttaaagcatatcccatttttgttgtcctgtgttacacagtcttatagttaaatagacttcaaaagaatggaagtggctcagatccctctcaacttctaagagaccctgatctctcatcccattggcccttctaatagagctattggcattcacatcctattttcagcccaaatgtcagttcctggagtacaaaggcggtggctgcttcagatgcttcagactgaaactgctctttgccattctcatggacactggagagttaagtttggttaaattgatgcctttttcttttaaaaaagaaagaatacacatatacctttgtgtacacacaagctaggaaacatcwatctaatacatggatggcaagaaaaaccagatctggctcatgccagttacaatggtctgtgaagataaaaagatttcttcagatttatttctcagccaatttctgcttttcctagggagaaattaaaagtttgttaaatacctatgtttagccttttattaatttagccggtgaaattaaaagtactggtagactgtaattaaattaagacattttcgaccttgaattaatgctgccattggaaatgttgacatgtcttaatagttggtctgcatgttacattaccaccatctactgttcataatggtcaatttttaaataatgacttttattcttatttccctcagtgaatcttttgtaaatgtaaatatcacatatgcttgtgaccactaatttgaatatggggcccatggtatccaacatgggtagtatttcccaattagggctccttggtacattaatgctaataagagtgtcccrgggggcgggaaagaggagttcagtagtcaaacttgttttggaaatgctgcttgctacatccaggcttaaaaagttacaatttaccccagcaaatttaaggatctgaagagttcttcagtaaagaaactggttcaatgttgtggaacccagtgttttccaagcttgtataatcatggaaatctttttaggtaaaccacctattaatatttttcaagacatcagagtttggtgctgtagggctttaggtcagagggtactgggcctattccaaaaactcatagctgcaagtgtttcattctatcaaatgccaacaagaaaactagacaattttacaacataatttctgctcataaataatttgccaccaggtttacagttttcttatactaccttcgagagacatacggtggcaaggtaacactgttgtcactatcacttcacagcagttatttctgaaagtgaaaaatcatcctaccactaggccttaataacaagtttatggcagaacttctcaaatgttgccagcaaaacacccctgatagtaaagaaggataaattcaaacccctggaatgagactgctaaaaacagcacatttctgaaatgttatgttttatcttaaaaattcatgcaagaaatagtggcatgtttgtgaaatgacaaatgttcagggttatccactgcagtgatatttttaataagaaaagatttaatataactcaaatgcgcatgaacaggaaaatggttaaataaattatactacaaccacaccatggaacatgctattgagctgtttaaaaaaaaaagaatggggaaatgttctacacactaacatggaaatatctccaagatattgtgtcatatgaaaaaagcaaaaaaaaaaaaaaacaaaaaaaaccagaagtgtataatatgctagcttttatcagaaaggggaaaaataagactctgtattcttaagttgctaatgtgtgcataaagcaattctaaaaggatccagaagaaactcttaacagtggttaccttttggggaagaggatgagaactcaaaaaaggggagagaaggatgaggagaaactcgaaacttgatcttttgatgttttttgagccatgtgaatgtgtaacctatcaaaaattatattataaagtcaaaaatcatgcaaatgttttactctactccatgacatattcaaatttgtcttaagagtttaagaagcagggcataactactctggaggctgaggagggaggatcagttgaaaccaggagtctgagaccaggagtttgagaccagactggacaacattgaaaccctgtatcaaaaaaaaattttcttaatatatatttttaaaggttttaaaaattacccacatattttcacaacagtacaactaaatccatatttaaactctgattggtaggttatctgagatatgtagggtcttgtgtgaaaggtatgggtttaggccatttaaaagttgcttaaacatttagccttcattccatttggtaaaccaacatcaatacaaaaaatgatctggaatctccactaaaaagtacttgtttgacagtttgggatttttatctacaggccggggtattttagacctggcaaatattaaccccagggtcccaggactcatgctcaaaattagtactaacttattttggaagtaactacggagaaaatgccacaacactgaaatgacaacccaaaatgtggagtgtcacagagttatgtgcactcctcagtgccagagtgtccaacggaaagccaactggttgggaggcaagaaacctcaaaggcaaaccttctgctttataatctaacgtaactggaattaaaactctccaagtattttcaaaatattttttaaaacttgttgattatttttaaaattaagtagtctggcttaagctaaacaattttccactacatttcccaaattttaaagaagtaggcttcatttggttatactaattttttttggaggcagggtctcactctgtcgcctaggatgggatgctgtggtgcaattctagttcactgcagccttgaccacctcaggtgctaaggcaatcctcccacctcagccttccgagtagctgggacagactgcaggcatgcgccaccatgcccactawttattactatttgtaaagacagagtctcccaatgttgcccagtctggtctggaattcctgggttcaagcgatcctcctgcctcagcctcccaaagtgttgggattacaggcatgagccaccatgcctggccttactatactttcagagaacttttactaaaatgctttctatatatgtggaaaatatatggcatttttatatggtctaataaataaataaaatataactcagatataactgatgaaacaagcaaatgcaatatgattagtgtcaataaaatgtactaaaggttcctgcattttattccagaagatactctaggtgtaagttttatgtccttgtctacctcctaagaatgatttaataaaccaacggtgtcataaaagtctcctacattctttcaaattgaaattttatttctaggtataaatgaggccagaattaaaaagacaaacagcatgaatagatgaaccgtgcagcacgaccagcagggagtcatttgttactgctttctttgattctgatcctgtctcagaaggctgttctctgtggaatcccttcagagaaacaaacaggcagtggggaccgcaagggcttaaaactctactgcaatctcctgatgatctgttggatattcataagtggcaaaatgattccacctttaggttttatttcgttgtaataaagaattatgaataattgatcactaggtaataaattattcaggtaggcacacagtttccaaggaatcctggagtgagtctggttaatggcaaagcaggagcttgaggmagctgctgaggggacacccccccattaacctcacactgcaaaggcatgggtagttagtgcctctcagtgtgggcttttcaataggggccatattaatgccttttgatttttttttttttttggactgaaacacctgttttattttcccaatctaaacaaaatttccttgacgttagtgttgtcacaagcaacaactttttttaaattgtttttgttatttataacatgtagttaaaagtattcatagatatatagtttaaaaaacaaaaaaatcctcagaagatctctacttttagaaaatgcagtttgaacaatatctggcaaatttggaggatcatatattattgttataaatgaggcaatataggaaataaaaacacaaaactgacatcttggttctgcatagtttatctgacaaactcttgaaatagataccgtttagtagaaaatacacgtttgacaacactgagtaacatatatgggctaaagtgggcttaacatgccactgatggacacacaaattaagccgtttgtgggacataagtacaaataccaattaaagaaatgacaaataattttgtaaattgtcatctaaaagcaagaagagtcccaaaataaatgacgtatagagtgacgatacaagtgggctaagtcttaggataaaattttcattcttaaactccataccactaggacatatactgcgtaactactgctgtttcacaggactagcaaccgtcaatcatctctttgctaattggtacaaaaactgcacagaaattatgtatctgaaattgggtctctaaattcgtctctagattctacatagaacataatcatgctgagtccataccatgaggtccatttgttattctacatggatttatgcctttaatctacatggaatgtataaccagagaaaatttaaaatgtgttttagaaccaaaatactaaactaacgaaacttttagctaactacaaccaaaaagcaatcattgttattgtatgtactattaattagaaaaggctatactagttcaagccttaggttcgcgaagtcaaaatggacaccaagtcttccgtaggcggagcaagtcagcaggcagctatcctccttacagtgcttctgtacacaggtgccagcgtctcaatgcaagagctcagaagagaagctccaaggtcaggagggctctactccttaggctgaagtgacatgtaaatgatgcatcattccactcagaaattactagccaggacactagaaaaagaaatggtggataggaggcaggactaacttgcagctcccactcagacagacagagcagcgtgtgaagactcatacagagaacttttgctccaagaactaccacaggaacataccaggaaagcgagaggatccacagatcctttgaaggaagcggattgctgctgcaggcacctggagacagccaaaacactctgagtgcccaaagtgtgaaagagggatcatctgcccccaaacacacaccctcactggggaacctgaaggtccagatcacagaaggatctgaccttacctggagctgagacaaatttagagagccaagtgaaatacaggtgtagaagcagcagcaggaagagccctgtgggcactcttggtccccagcgaagccgtttctgactttgtctcacaggggtccttggagagggctgccagaggaactgggaaaagaccacagggagaaggaaacttccagctgaactttgtaaccattttgaccaaacrcagtttcctggacagaacctgggggagggggcgaatagggagtgcagacacagcacagaagctgcggcaggtggggaaacacagaacctgaaagtcctgcatgctttctcagcggggaggctggtggcctggggaaagttcccagctctgttcacccgctgcctggaaataaactcagtgctattgagagggcacggtaggagtaacactggccttttgggatacgtgggagctgcatgaggcctgtaactgccagttttctcccacttccctggtgacctgcatgatgcagcagaggcagccataatacccctggaaacataatcccactggcctgagaaccacacccacataccccacagcagccacagcaagccccacccaagaagagtctgagctcagacacacctaaccttgccccaacctaatggtctttctctacctgctctggtagctgaagacaaaggacatattctcctgggagctctatggtcccacctaccacctgatccttcctatactaccacagctgatgctctcttgaaagcgccaccttctggctggaggccaaccaacacaaaactagtacaataaacaaaactacaaccaaggaccctcgcagagtccacttcactcccctgccacctccactggagcaggtgctgggatccagggctgagagactgaagatggttcacatcacaggatgctgtgcagacactccccactagcagtccagagcccagtagctctgctgggtggttagatccagaagagaaataacaaccactgcaggtcagctctcaggaaaccacatccctaagggaaaggggagagcaccacatcaagggagcaccctcatgagacaaaagaatctaaacagcagtccttgagccccagatcatttctctgatgtagtctactcaaaggagaaggcaccagaaaaacaatcctggtaatacgaaaaaacaaagtgaacacccccaaaagatcacactaactcaccagcaacagatccgaaccaagaagaaatctctgaattgccagaaaaagaattcaggaggtcaattattagctaatcgagaaggcatcagagaaaggtgaagtctaacttaatgaaatcaaaaaatgatacaagatatgaaaagaaaaaacttyggtgaaatagaatacataataaagtgatacttctggaaatggacacacttagagaaatgcaaaatgcactgaaaagtctcagcaatagaatcgacaagtagaagaaaaaacttcagaccttgaaaacaagactttccaattaatctaatctgaaaaagacaaagaaaaaataatttttttaaaaagcctccaagaggtttgagattatgctaaacaaccaaaccaaagaataactggtatttccaagaaagaagagaaatctacaagtttggaaaacatacttgagagaataatcaaggaaaacttacctggccttgctagagatctaggcatccaaatacgagaagctcaaagaacacctaggtaattcattgcaaaaagatcatcgcctaggcacacactcatcaggctgtctcaagtcaagatgaatgaaactatcttaagagctgtgagaaatacctaatgtaaatgaggagttgataggtgcagcaaaccaacatggcaaatgtatacttatgtaacaaacctgcacgttgtgcacatgtaccctagaacttaaagtataattaagaaaaaaaaaaaagaatcactttattggaaaccagatacatattctgattaaggggaaaaaaagagctgtgaggcaaaagcatcaagtaacctataaaggaaaacctatcatattaacagcagatttctcagcagacaccctactagaagggactgggaccctatctttagcctcctaaaagaaaataattatcagccaggaattttgtattcagtgaaactaagcttcataagtgaaaaaaagatacagtctttttcagacaaacaaatactgagagaattcaccactaccaagccagcactgtaagaactgctaaaaggagttctatatcttgaaaacacattttcgcaatacaccaaaatagaacctccttaaagcataaatctcacaggaccgataaaacaaaaacaatgaaaaaataaaaaggtattcaggcaacaaaccgcataaggaatagaatagcatgtatctcaatattaatgttgaatgtaaataacataaatgctccacttaaaagacacagaatggcagaatgaaaaagaattcaccaaccaaccatctgctgttctcaggagactcacctaatgcataagaactcatgtaaacttaaggtaaaggggtggaaaaagatattccatgcaaatgggcaccaaaagcaaggaggagtagctattcttatatcagacaaaacaaactttaaaacaacagcagttaaaaaggacaaagagggacattatacaatgataaaaaaaacttgtccaaaaggaaaatatcacaatcctaaacatacatgcacccaacactggagctcccaaatttacaaaacaattactactagacctaagaaatgagatagacagcaacacaataatagtgggggacttcaacactccactgacagcaatagacaggtcagcaagataaaaagttaataaagccacaggacatactaaccagcaactatagaatatacattctatgcatcagcacgtgtaacattcattctccaagacagaccatatgataagccataaaacaggtctcaataaattgaagaaaattgaaattatatcaagtattctctcagatcaaagtggaataaaactgaaaatccactccaaaaggaactctcaaaaccatggaaatacattgaaattaaataacctgctcctgaatgagtgttgggtgaacaataaaatcaagatggaaatttaaaaattatttgaagtataatagtgacaaaacctatcaaaacctctgggataccacaaaggcagtggtaagaggaaaattcatagacttaagtgcccaaatcaaaaagtctaaaagggcacaaatagacaattgtcgattttaggtctttcttgctcacatcaaaaagtctaaaagggcacaaatagacaattgttgattttagatctttcccattttctcctgtgggcatttagtgctataaatttccctctaaacactgccctagctgtgtcccagagattctggtatgctgtgtctttgctctccttcatttcaaagaacttatttctgccttaattttcttatttacccagtagtcattcaggagcaggttgttcagtttccacgtaattgggcagttttgagtgagtttcttaatcctgagttctaatttgattgcactgcggtctaagagagggtttgttatgatttctgatcttttgcatttgctgaggagtgttttacttccaattatgtggtcgattttagaataagtgctatgcggtgctgagaaaaatgtatattctgttgatttggggtgaagagttctgtagatgtctatcaggtctgcttggtccagagctgagttcaagtcctgaatatccctgttaattttctgtctcgttgatctgtctaatattgacagtggggcatcaaagtctcccacaattattgtgtgggagtctaagtcccttggtaggtctctaagaacttgctttatgaatctgggtgctcctgtattgggtgcatatatacctaggatagttggctcttctcgttgcattgatccctttacattatgtaatgcccctctttgtctcttctaatctttgttggtttaaagtctgttttatcagagactagagactaggattccaaccccccccccaccttttttttttttttttttttttgctttccatttgcttggtaaatagtcctccatcctttgttttgagcctatgtttgtctttgcacgtgagatgggtctcctgaatacagcacaccaatgggtcttgactctatccaatttgccagtctgtgccttttaattggggcatttagcccatttacatttgaggttaatattgttatgtgtgaatttgatcctatcattatgatgctagctggttattttgtscatttgttgatgcagtttctccatagtgttgatggtctttacattttggtttgtttttgcagtggctggtaccrgtttctcctttccatatttagtgcttccttcaggacctcttgtaaggcaaaatcctcagtatttgcttgtctgtaaagggtttcatttctccttcatttttgaagcttagtttggctggatatggaattctgggttgaaaattctttcctttaagaatgttgaatattggcccccactctcttctggcatgtagggtttctgcagagaggtctgttgttagtctgataggcttccctttgtgggtaaaccaacctttctctctggctgcccttcacattttttccttcatttcaaccttggtgaatctgacgattatgtgtcttggggttggtcttcttgaggagtatctttgcagtgttctctgtatttcctgaatttgaatgttggcctgtcttgctaggttggggaagttctcccggataatatcctgatgagtgttttccaacttggttccattctccccgtcccttacaggtacaccaatcaaatgtagatttggtctgttcacatagtcccatatttcttgaagtctttgttcattacttttcattcttttttctctaatcttgtcttcacacttgatttcattaagttgatcttcaatcactgatatactttcttccacttgattgatttgactattgatacttgtgtatgcttccttcatgaagttcttgtgctgtttttcagctccatcacatcatttgtgttcttatctaaaccggttattctagttagcaactcctctaatttttatcaaggttcctaacttctttgcattgggttagaacaygctcctttagctcggaggagttcattattatccaccttctgaagcatacttctgtcaatttgtcaaactcattctccatccagttttgttctcttgctggcgaggagttgtgatcctttggagaagtggcattctggtttttggaattttcagcctttttgcgctggtttttcctcatcttcgtggatttacctacctttgttctttgctgttggtgacctttggatgaagtytttgcgtggtcatcctttttgttgatgttgatgctattgctttctgtttgttagttttccttctaacagtcaggcccctcttctgcaggtctgctggtattttctgggggtccactccaaaccccgtttgcctgggtatcaccagcagaggctgcagaacagcaaagattgctgcctgttccttcctctggaagcctcatcccagagtggcacctgccagatgccagccagagctctcccgtgtgaggtacctgtcgacccctgctggaaggtgtctccccatcaggaggcacgggggtcagggacccacttgtggaggcagtctgtcccttagcagagctcgagtgctgtgctgggaaatctgctgctctcttcagagtcagcaggcaggaacgtttaagtctgctgaagctgtacccacagccgccccttcccccaggtgctctgtcccagggagatgggagttttatctataagcccctaactgaggctgctgcctttctttcagagatgccctgccagagaggaggaatctagagagacagtctggctacagcggctttgtggcactgcagtaggctccacccagtttgaacttcctggcagctttgtttatactgtgaagggaaaaccacctactcaagcctcagtaatggtgaacacccctccccccaccaagcaacagcatcccaggtcgacctcagactgccatgctggctgtgagaatttcaagccagtggatcttagcttgctgggttccatgggaatgggatccgctgagcaagacctcttggctccctggcttcagccccctttccaggggagtgaacagttctgtctcgctggcattccaggcaccactgggatacagggaaaaaaaaaacaaaaaacaaaaacctgcagctagctgggtgtctgcccaaacggttgcccagttttgtgcttgaaacccagggcgcttgtggtgtaggcccctgayggaatctcctggtctgtgaagactgtgggaaaggtatagtggctgagctggaatgcactgttcctcatggcacagtccctcacagcttcccttcgctaggggagggagctccccaaccccttgcacttccggggtgaggtgacgccccaccctccttctgctcgccctccgtgggctgtayccacatctaaccagtcccaatgagatgaaccaggtacctcagttggaaatgcagaaatcacccaccttctgcattgatctcgctgggagctgcagaccagagctgttcttattcggccatcttgccctggaatcgccttttgaatttttataaartagaagtctccactgagtacttccaagtactcaatactgagttcatgtccaagtatagttatgaaatattgagcccttgcctcttcatccatcagaacgggatattattaccagctgaacacaacttttgctgctgaaactagtgttgaactaaaaaactgtccaattaaaaaatgcatacacatatacacaccttaaacacacacatacacacacacatatatatacgtgagtatatatttacgtatgtatacacatacacacacacacacagagtttttatggttatgtgagctagcaaaataatgccaaaataagctttatctgtgggaaattatctactgttgtcagttttcaaaaccttttgaatatgtacttactccctgcaagttcaatagtcaactgctttaaagcttacttaaaatgcaatttcagatatgtgtcaggtccaattcatatggaacacccaaatgtttcattttttaagtaatgttaaactgccttgcaactcacatctgtcattaatccttcctgtaattttgattactaaagcaattctaaaaataatagaaactactcattagagctcaataatctttgcaccaaaatgtctttgaaatagcaatataaattaaaagcagctgatcaccaaatagcaaatccaatattgcaaaaagtggattggccgatattatccccaaactcacagtgtatgcatttgtatgaggcttatgagatgaaagacataagcaaagaaagaagagaggaaatgaagggctgtggggccacaaatcttccttgaatctcccctgaaggaaagcagccatagctaagtgattaggttttaaagggtttctcaaaattcaaactaatagggaagtggaaacatcaaccaaactttaattaaaatgctaagtgactgctgcatgtgggagagactgagaaaattgacacccaaacacattctaatcagaaattcaatgttccaaattttccactcttagaaagttggaaacctagtatgtaggacaatattatcaactacattttgatcttccttcttcacttgcccaataaaggtaccaaaaacaaagcctatgatttttctctgagctaaaaacaataaaattggctggtatgaacccaagattaaaaagcagcactcagctgaaagtaycaagtttcataatgattatcattagtaactgcaaattcagccagtttaacaatcttaagggttttcatatatcatggtacagggtttttgctttttctaaacacaattgttaaggtacaattgacataatacactgcacatattttaagtgtataatttgccaaattttgatatatgtatatacccatgaaacatgacaccatctctacaatcatgataatgagcatatccatcacccccacacatttcatcaggcttagtgtttgctttcttaataactaaaactttgggtgttttttttttcatataactacccaaataaatacagcactactgtactaataagtatgttctatagcatgtcaaaggttcataattattcattcgtgagtagcagggactagggcttataagagtatctgagaaataaaaagtgttctcgttaaactacggaatggaaattcaatttcacagtattttaaagcaataaaggtcacacaatattaactgcttatttttgatactacataacattatttatacaatgcacaattagtggagtaaactacttttagaactctggtgccaacaatgtttatttcccacatagatgtacaaattactcttaattaaatttacaaattactctttccaaaaaccaagcttaggaataactgaccaagaaactattactaacatragggttgcttgtctctcatgttgacttgtaagtcatgcacatcactcaaagtgcactatttaaacatggatgttatggcaactaagcttttttccccaggaaaatcagttgaagagtaataaattgatccagaaactaattttaacttgagaattttcccccttctcatttcttttaaatttaagtcatatacatatctcatttcaagttacttaagggtggatgatatcacaactaaaattttcagttcaaaataggtataaagttgggtgctggccaaaattgcctatattactcttgagagacattcatgcgtcaaaaaggaaccagatcggtttagaaggaaaggactgagtaaaacagatgcctccctcaactgatccagttaaagtaagcaatggtaaaagggaactgcctgctgtctgccaggaagagagctgggctgccggatgcaccaaaagttgttggaggaaatattctccccaaaaggctgcttgtgtagaaacaacagcaagaagggctagttacagattatacttgagggtgttgtgcttgttttggggtcaggaaattaaagttagctgactgaatattctaatattcatcaaccattaagaattctggatttggttattgaggttcctctggactctattaaaaatcagctcactttttattataaaacatctcgatgaaaaaagcccttttaggggaaggaaaaaaaayctacaaggtagactacacccatcaaattttgctcttgcattttttgcactcatcctaaaatactttatttattgaataaatgagatacaataacttaataggcttaacacaaaaatcttgcactttaaaaattttaggaagtcaacaatgacaatgtaaagggatcagcatatccaattacatttattattactattatttactagaatagcttagatattcccctatctcatacatttaaatgaagaatgctattccatatttcatgggatgtcattcagtgttagccaaaccattagcttccctactcacaaatccaccagaacaacacattgaaagaacagagtggaatgataaatttaaataagtctgaaaatctaacaagtatactattgtaatttgaatatacttttactgctgacactaatacggctgtaatattttaaatacatcacttttgttttctttcaaacaacagtaatgtaagaaaaaagaattatttttaagaagaatttttgagtattgttgccttcttcctaactgttgtcttcttcctaaatgtttcttggcaattcagtcttaaaaggaggcttttttggccccctgcctaagccaaaaagaaactgagggtttccctgcagcctactcattctaatattttattagtcatttctgatctgtaaatattaaaaaccagatagaaagcacacggattcttttatgctaacacatgcagcaaagcggccttaggaaagtcatttatctcagaatattgacttcattaccatgattgaaactaatcaaagtaactatgtgcccttgcattttcttctctccttatccattccatctcccaaactttaaatataagatggccagaagctcagaggcttgaccttattgtgtgcagagaactgacaaagcccaaagtgaagtccaagttcaaatgtactctttctatatttacctagaggaacctaagcacaagattccgagaatctgaactgtttttaatattaattttagtattaaaatttttaatattttaatatgctttcatgttatactttctcttaaaagataagcaggaagattttttttttaactgtgagaaactgaaagaaactgtgttttgaggtctggcaaggcaaaatagaaagaaatcattagtttcttccaaattgttttcataactctccacggcgtaaaccactgaatcctattaaattaactcgtcccactcaataaacccactatcccatcacagataaccactggagagaactcctagacataatatagaaatagtagctttaataagaatacatagattgagttcaaagttggactcattaaatctattgatgttttgtttaaaatgactcaaaattgaaagtaaagatatgttaaaatgattaaataaatcagacagaaatatccataaataggtattagtaggtacaatatataaayattagctttgctaaaggcgatcagctattaaatggcagaaattacagtcacaatctgaattattgaaagtgtatttttaatattacaaaaacccacacattttagtaagaattattattcatgctgggcatggtggctcacgcctgtaatcccagcactttgggagaccaaggcaggtggaccacgaggttaagagtttgagactagcctggccaagatggtgaaaccttgtctctactaaatatacaaaaattagctgggcgtggtggtgggtgcctgtaatcccagctatgcaggaggctgaggtaggagaattgcttgaaactgggagatggaggctgcagtgagctgagatcacaccactgcactccagcctggcaacagagcaagactccgtctcaaaaaaaaaaaaaaatggatgaagttctttttatctaattactacagtgcaaatgtagctgtaactcacaactgacccaaaaaatgcttccattgaatgacacagaatgcctgtcatttctcagtgaccgaagcttgcattccttagtttttcagttatgctactgacaggaagaaaatgctgaaccagtcatcacatcaaatcgctgaggacgctaaaaggcacaatagtcttctacttcaaagaaggcactagaatctagatatccaacaagtggccgttaaatgacaagaaagccatagactattatgcaggtgttaaaaatgatgcttttaaagagtatttactaacatgggaaaatgcttatattttcctgctttaaaaaagcatgtgagattgtatatacactgaactctattccattttagtgccattcacactgaatgcaactcttctcccatccctttgcctagtacaaggatcctcaaaatgcagtcctctaagatgtagtaacagctgttagaaatgcaaattgtcaggcccctcctaccagacctgctaaatcagaaacctctggggtaggggggagccaagcaatctgttttaataagctctccagacaactctgatgctcaacaaattgtgaaaaccactggctacttcttaataattcttcagatttcagctcacagttctcagggaagccttgcctcacccaaccttccatcctgcaagcaaagatgagtttattgtacctcacaagaaccaagatttttctttcacaagttattgcagctaaaattatttatgattatgtaagtagagtttttatctccagttgagatatttcaagtctagtgacacatatgaatcacctggaagttctcaaaaatccttggccataccccagaccaaacagaattcactggagtatgactcaagcatctgtactttctaaatattgtgattccactgtttggccaaggttaagaatcactgtaccagactcaagctccagatgaccagtaaayggtgaccagtatttgttgaatgaatatgtgggttttttcactttattttataggttttgttttgtttcagtcttgcacatgatacaaaattccaaatgcacagaaagggttcagtgaaaagtgaagtctccttctcttcctatctcctctcagaggcaatgactaggaccaatgccatgtttcgttaaaagactgaatatttgtcagtgcatacagaaaagaccacaggttggatggcaggattatagattattttrctgcttctttatgcacatctgaactttttataaagtgtatacacattactttcaatattgggaaaggaggtaccctatgaatatttgtatgggggtgcatccagagctatttagtagataaacactgggtcttagggctcccacaacaatagccacttagaatgtacatacagctgttccattttgtcaagttcttagaagagaccttttacctggtttaagcgagtaattgcccaattattccacctgcttattttggttatattttcacttctcattagatatacagcttctccagaacttctaccagaaaatggtgggagggtgcacaaaggaggaggtactgttcatcctaggaaccagattaagaagtggaatcatggtttatagatctatcttgtcttgatttagttaatataagctcctctccaagactgaccatctctgggtgtatgaatatgaaaagctgaggcctggaccccagggtggtggctgaacccctgagcccttttgactccatgccagttagtgagtctgtctcaatacagtactttggaacagggctggacgtctgagatttctataagtagaaactggagtatggagagctttacaacaatggacccagacttttttggcttttggggttttttaattatctttttcttactttctacctcccttactcttatggtctaagaccactcccctctgttgtcagtatgactcattctagcatcaactcttggccccctatcttccattttgtttccataactgggtagaaaatcagcttgctaggacttttaaaaatctactctaatgtagacccaagagctctctgaggaggcaagagcctggacttgagggccatttctttaaggacttgtaggccttttactatttaactcctgatccttatctcaggcagacatatgagatagagggggaaaaaatgccttctgtagagataaagcatttccttgttaccatttttcccatatttagacaaagaccaaggtgtacgatcacagttaaggggtaaaatatttggatacgcacttggataggaccaaggggaaaatacacataagttagatagtacacagaaacaagtaagataatattgagttggaaagggagtagccactccaacatctccgagtgcaacctgccacacagatacttaagcattgtcttgtactgtatactagttgttttatgtgtgttgatatagtcttccggactggaagcacctgaaggctaggccttatctcctactgcttcagtttcctctctcgtgctgagtccaaagcaaaggtctaatatttaaattgtggccgggcgcggtggctcacgcctgtaatcccagcactttgggaggcccaggcaagtggatcacaaggtcaggagatcgagaccacggtgaaaccccatctctactaaaaatacaaaaaattagccgggtgtggtggcgggcgcctgtagtcccagctactcgggaggctgaggcaggagaatggcgtgaagccgggaggcggagcttgcagtgagccaagatcgcgccactgcactccagcctgggtgacaaatcgagactccgactcaaaaaaaaaaaatttaaattgtattaaatacttcatagttgacagactaaaacagacaacagcataaaatcaactctgcatagtaagatcactatatcttaaatgtgataaatttttwaaaaatcattataaccaacattctatgctgataagatgaatgttgaaattcactgtagctgtggccatgattaattacaagtttaatcatgtattttagggtaaacctatttccttaatatctcttttctattaaattacatgcactatgctaatgttaagggccaaagtaatttctgggctgatcaaatcttttgggtttgattttttgaaaagatactttgacaatttaacaatactataaaataaaatgaataagaactagcacaatctttttaggactatgacaacataattagactagagtgtctataattatgaaagaaaatattctcaaatattgttttatgaatttcatgatgcataataaaggaaaaacctctatctcattcaccatacattttaacagtttaattttattctactgtgataatgaaaaaagggatgcccaatatttatgccaggaagaaaactctccaaacatgcatcaagcaagtgtaatgtctgtactgtaggttttattttaatctcacagctaattcagaaagtgaataaaaatgtaaaggaatatggtatttacattgtaattaaaggtcaccctgtatgcaaaatgtcaatggtaaagtgatgcccccaagtggcataatgataaattgcaatactttgacggaaaagttaagtactatgtacatacagctgttccattttgtcaagttctttgattaaatatagaaatgtatataatgaatctgtatttcatagaaactagtcataagtcctacaaacttattgtcattcctttaacactgataccaagggatagtctgataccttccttatgagctcaaaaagttaagggtgtatctgcaaaacaaaaagggaagtcatatctattctgatgtgttgaaggaatagcattcataccattatagaagtctgtataaagtattcatcttctagccacctctaacattaaccaattccttatgtttgtggtctagtatgtaaagcataatttaaaaccttatctagtcaaattgcttggacaatgagtagtgctaataatgtgctttgctcacaaactaatggttcagtatcaacacaaaaaaaaaagagtttagtttcctgcctcatayatgcattaaacataacaatcactgatgaattgatatcttagctaaaaggttcacattctgagaaccaatttattttggacagccacagagatataaaagatgacaacagaattgttacaatctcaagacacatcttgaataagttttttaaattacatgcctggtttcagattggtttatttgggaaatttttctcatttaaaagtaatccagaaaaaccttccrtttattagaagtytccaattgcagtcattgggtggtaattagctaaagttttcttaggcttcctttaattattcttttaacttggattgtttataattaaggtgaatctgtgctgtttttgaggaataattatgagcaaggcaatgtgacatctaaatcttatataaataggcagatatcgtattcttattacaatcctatgaggtattatactcattttaaagataagaaaaccaaagctcagattaggaatgtacagaatgtagacttcacattaagaacaggcctggctttactttttgttcacatccaaagctgggattttaacaatgacaccatactgctctgtttctattacagcattctagaattttgtgagtagtcacattcatacttttttctgattttagcaaataattccaaaagcaattgtctacaaaggtcggcacgtagtggaaaggtgtgatgcagctgtatgccagagacagtaaggagaggtaggaatgtggctaactggagaatayggaatttgtctaagggagtagctgctgcctagctttagcagtccattgtggctacacaggaactgatgttagcaaacgttcccaaatcttttttttctagaaaagatgaaatgctcaatttatatgagctgctcatttaaaaatactgactactggccaggcgcgatggctcacgcctgtaatctcagcactttgggaggccaaggcaagaggatcacctgaggtcaggagttcaagaccagcctggccaacatggtgaaaccctgtctctactaaaaatacaaaaattagccaggtgtggtggtgcatgcctgtaatcccagctacttgggaggctgaggtgggagaatcacttgaacctgggaggtggaggttgcagtgagccaagatcgtgccactgcacttcagcctgggagacagagtgagactccgcctcaaaaaaaaaaaaaaactgattaatttactaaaaagaaacactacccaggccaaacaaaagacatctgaaagccacatgtggccagtatgcaatatgttttagattctgatgatgaatgattcctttcccagagattgtggactagaccttctggtgccaaatgatttttgtccgttatcctcaccactggattcattccacaaacatgtctgccatcttcagctccagtcatgtgtttttttaagattggttcaggtacaagaaagatcactaacaaatcacttgccaaccaaccagccccagccccctttcttctctctcattctctttctctctctcttccccgctgactacaaacacactctctccactcacttattatcttaagtctaaaggtttcaagtttgatcttcatacatcttattttacatccttttaattaactttttagtcctcctgtgaattatcttaaaatttttcatattcctcattagttgaagaaaccaaaattggatatgatcctacagtgtagtttttagaagtactgggtctggtttaggtcttactctcaatgtttccataaaggttatctaataattgtcagaaatttatcattctattctaaatggctagaagagcacctctaggattaaagagaaaaaatccttttcagcaggaatcataatgcatgttctaaggacatcagaaaaatgccagctcttttatcatccctcatgtagaaattgactaaaaactataaattctagataattacagcttttaaaaattctggacagagaccatttaaaagattgagttttaaaacaaagtagtaacatcactaacatttacctttacaattcctatgacctatgaagatgtagaaaagtgtttatcacactgattttaaatccactcttaaatatccaataggcaaaagctggaagaacttagagtagccttaaaaccttagaagaaaacaatatattatgggatgaaaatgtggtcttctggggttaagggctgatatcttggatcattcttccttctgctttctgttcctcctgtgtttctgataggcaagtttcttaccctaacttcagttccaacttactttccactgcagcaaattaaaaaaactttacacaaaaactagaggtttatctgtaagggaggtactgtctgaagctattaagagtttttctctactatgaaagtgtagagggtccgatcataatcaaaagagacgaggtgacaagggggtcattaacataagctaattttaaataggagtgtccatttggtttaagtgtttaatctgacagctttctgactacggaatttgaaaatcctcgccatggaaagcccaaagaaaattaatactgttactttctttggtataccctattcatctcaaatgtgaataattgtttatttgcattttgtaacatttctaaaaatagtcattatgaacaattcttattttctcattcaagaagttccaatcaagttaagtggaagtaatattgtcactgagactgtggcatgcccaaacatcttattttcacataatctatcccatttctagctcccttctttaggtcatttggatactttattcacctgctgaaatgcctttaaacctaatatgaaagattaattagggagcttacctatatttatgaaatacttgctttggtataaagagcaaagtggacattactccatgttctttttttttttttgtcagtcttgctctgttgcccaggctggagggcagtggcatgatctcggctcactgcaacctccacctcctgggtttaagcaattcttgtgcctcaacctccaagtagctgagatcacaggcatgtaccaccctgcctggctaatttttgtatttttagtagagacagggttttgccatgttggccaggctggtcttgaactcctcgcctcaagtgatctgccaaccttggccacccacagtgctgggattacaggcatgagccaccatacctggcctgctccatgttcctaatcagctaagacctgcaaacaaaaagcagcctactcaagattcataggaagcayttttacttacaattcctctcctcgtttggctttcttgtctgaaaccagatagacagttccaaaacttccactgccaagtttttgttgaagcacgtatcttcttgcaatcaaggtctttggataagtggaaatggctgttgatccactcacacacttagctgcctcttggaatttcagcattgctccaaacaagagagaactggttcattcatttatagaaacttaacattccagtctcctaagaaatggtcaaattcatccagtgttggtcagttccttaaagatgaaaagttaaaagatcaggtctaaaggttgctaaacgatgtctaacaaaaagtgttaagtgcagtgatatctgcaccttgatcagcagactgacaccatattggttaacaacttgaaaaaaaatgttaaaaggtagagataccacaaattccagaaggcaatctttcacaggaagagcctccctttgtacattgaaatttggcagaagtgaattatagccaactttccacaaatttctgggatgtacatctgttttacaatgagcaatctcttcatttatttaagatttatactccccaactacttataaaagaatccaaatacaagaacattatcacctccttaaatctatacatctgcatcaacctttttgtaatgccctcttctcaccttatatttactttggtttacaaagagtgagttaggattaaacaaggaattagcaggtgctgtttcctttagatttatttttttctgtagatgttaaaccacagtttttgtatttattaggacagatgcaaagaaggataaggattgagaattttttcccatgctcagcaaattctagtttctgaagttcctattgtacacattgtgtataatctctctggattaaaaacaggaagagttacaaattcaattcaaacctaaaatcccatttaatgtcagtggaatataaatgctacagataaatctgtaattcctcagggagctatgagacgtggcagttatgaaaggcaggactgtttaggccgggcgcagtggctcacgcctgtagtaccagcactttgggaggccaaggcgggcggatcacgaggtcaggagatcgagaccatcctggctaacacggtgaaaccccgtctaatacaaaaaaattagccgggcattgtagcgggcgcctgcagtcccagctactcgggaggctgaggcaggagaatagcgtgaacccaggaggcggagcttgcagtgagatctcgccactgcactccagcctgggcgacagagtaagactccatctcaacaaaaacaaaaacaaaaacaaaaacaaaaaaaagaaaggcaggactgtttcatatgagtaggtacaaagtaaaatcacttttatttcatcagaatgttaaatgttttgttagttatcaagaaaagtgtgcttttgttttaaatctatatagaaataacattttaaattgaaaactgcctacaccttgaagttaggttttcatattcaacaattccaaagctatgagacaaaaacctagtttttaaggatggtcaatgggctttacgtggtggtgtccgtcaaccacaaaaactactagggcaattaaccacaaaaatcctcaaaacagaacataagtaaatgcccatttacaacattttccttcttaaaatgtatgaatcagttaagttgtacctaataccagtgagattagttaccagctttttcttttcccttccaaagacacgttagtaaaatctgctggaaaaacaactasagagcaggcctctaaatataccttttgtttttacttccccttcactgtcataaaagtgatgccgtctggccatactaagctgttcaaataaatatatggacttacagactttccagctgaaaagggtccttcaggtcactcagtaattctccttattttaaagatgagattaaggttccttttagagaaggacagaattagggacggacagaatgagaagttcacttctagcggctcttattttaaaggacagtctaaacccagcagtgcttaagtagtctggtccaggctgcagaagactctgggactaggttccctcccgcccaccctcacagactcagccctgccacccccatcccagtccacttttaggtcatccattccattagtctcctctgcgcaaccataaacctacccaagaatgtgtcgcattgtctagattctagaactatctgttcacttgacaacacgctccccctcgaggtttgagtgaacttgggcactgcgaacacatcttctttatttctgcatccccaatccctggcatacctcctggcatatactaggtgtttaacaaaccttgttaaggcaagtaagtgtccagcagatcaactgccgcccaaaggagagaaaaaaggttagttaagaaagctagatgggaacttggagaaagttactaccttgtgcaaactacccsttctcggtgaaacagatctggctgggggcaaaagacaacggaaggagtatttatcacaagttgaaaaccagtagttatcttcccaggtaataagaggaaggcaatttgtcaccagtttctgctacagcacaaatctacctttaaagtaaatcttaaccttaaggtaaaacgaacaattccttgcttcttcacctttttaaacatttacattttggcaaagcaggttaacgtttattgaggggcactgagactggagtacatccggaggtaagatgtccaggaaagcgaggagatcgcagccatggcgtcctagagattcggaacccagcccgggcagcttgaaaccattaccttccccctcgcaggggagcctggctagccccaaggaggacagttcgctttacctttccctgtcgtggtcggagcggcgcccggggctgcccaagtcttgcgggtaatcgggcaggcctcaaactaggggcaaccacacccaccgagcgccagacaccgcgggccacggctgtttggaaccgtggccagggagacggcgcggggcatactgggaagtcggggcgaggcggcaccaaggcggaagtgttcgccgacccaagtaggcggagaaagcagaggaggaccggcgggccaagctttcctagcctgacagcagccatttcggaacgtacgtcccagccctctttagctacttagcgcctctgggcccgagaacacctgctccttggctcagtctggcgccaccggcatcacggaactgtacttcccagagacgtcacaccgggagacttccgattcccgctcttgagattggactctcacgtgcaggagccagtcctcgctgggctctagcgggcttctgatggaggagctactcctctgggaggacagagtaggtgggctctgctgcaggtccgggcggcgggttgtgagggccgaggtggcacggtgtatgaaggcctgtgtttgaagacttaggtcagaccttttgcccgcctttcccctatgcagctctatgcaactgtctgtgcaaggtcctgtaatttgcgtaggacgccttgacacagtctctgcttatggacgctttacaaaactatcttgcaaagaaataagtactatacaggataaggttctgagatactgacagggctggaactagggtgagataagtgtaaaatgtaaatggatgccaataaaattcagtaatcaaggtaagttttaatgcaatctctaaaaatcaaaattatagcaaaaaaaatccatgactgacaaaatgtcacgattttaagtaatagtaacagtaccgtgctgtgccatattgaagcccgaggtgtcaaaagaaaaaccatcaattctgatcctgcgagttaagttagccaggtgaggaagcgtagctgggccagatatgcaaaataagatgatgaaaagagctcgtggttaggggtgtaactggatagaggggttcctagaggcatgaagcagttttccttataccaaaaactatgccaattaagaagggcccacaaatccaaagcctgaaagaagttccgtgactgattgtcaatacaaaagaaaaacttgatccttatcataggtcctacacaccttactttactgaagcccaaatgctttgtgattatgagatgaatatgatatcttttttttagcttaggactttttactttgaccccacaaaacaaatactctgtgctgtaagatgttgactattaccacttaagaatcaaagttcacagaacttctatactggtgtgtcagtaatggacttcaactgatttttctttagaattagcagcagcctctgtcaccatccaaagattacaacccatgaaaccattgaatttgtgccttgtatcagaaagcaaaggagaatgaaaaagcacagctaacattgcttgaggatctaggtaagaatttatgatgttgatatctatgttctatctaaagagcacttcataacatttgctattgatttaatggtgctggaagcaatgacttggtgccccataactagcatcaattgaaaatgttttctgttgttttaaacaggcgattaattctttagactgtcatcatgggtatccgaggactaatgagttttgtggaagatcatagtaatgagttcttcactgatttgaagttgcgggacacaaaaattgtcattgatggttatgctcttttccaccgtctttgcttcagttcaaacttggatctccggtatggaggggactatgattcttttgcagatgttgtacaaaaattctttgaatcactgtttgcttgtaatatatgcccatatgttgtattagatggaggatgtgacatttcagataaaaagcttacaactttaaaggatagagctagagagaagatccagatggcccattccctttctgttggtgggagtgggtacgtatgtcccttactcatccgggaagtattcatacaggttttgatcaagctgcgggtgtgttttgtccagtgcttttcagaagcagatcgggacattatgacacttgctaaccattggaattgccctgtgttatcatcagatagtgacttttgcatttttgacctgaaaactgggttttgcccattgaatagctttcagtggagaaatatgaacactattaagggcacacaaaactatatccctgccaaatgcttttcccttgatgcattctgccatcacttcagcaatatgaataaagctctactacctctctttgcggtgctatgtggaaatgaccatgttaatctacccatcatggagacattcttaagtaaagcgcgtcttcctcttggagctaccagttctaaagggaggagacaccaccgaatcctgggacttctgaattggttgtctcattttgccaaccctaccgaagcactagataatgttctgaaatacctcccaaaaaaggatcgagaaaatgttaaggaacttctctgctgttccatggaagaataccaacagtcccaggtgaagctacaggacttcttccagtgtggtacttatgtctgtccagatgccttgaatcttggtttaccagaatgggtattagtggctttagctaaaggccagctatctcctttcatcagtgatgctttggtcctaagacggaccattcttcccacacaggtggaaaacatgcagcaaccaaatgcccacagaatatctcagcccatcaggcaaatcatctatgggcttcttttaaatgcctcaccacatctggacaagacatcctggaatgcattgcctcctcagcctctagctttcagtgaagtggaaaggattaataaaaatatcagaacctcaatcattgatgcagtagaactggccaaggatcattctgacttaagcagattgactgaggtaagtatttgtaatactaatgaaatttttgtaaagtactttacaggatacaaagtgctgtcttctatattagttcacttactataacaaactgatgaggttgagtgctatcttgccctcatgtcgtagctaagaaatctagaacttgagtgaactaggtaatgtcttagccagaaagtgtcagtgctaggactcaaacctagctcttttagctctaaatctaccatttccactgtacttcagtagtctgtgttatcgtcacagttattactactatattgttattactactaggttaatactagctatcaatagaatgggttacgtggctgaaaaaaaaaggaaaaaaattcacaactgcaaaaaaagtgtatagacactaatcataggcacaacatctcagactacatcggatttcagataaggttagtactgatgctaaggtctaattttttaacttttattaatgaataccttttttaaaataggtttttgtgtcattatggttatttgcctagtttgatacagaaaacatgactcttagtctaacttagtgttgcttaaacctgagtaacacccagaccaccttttcaaggagaaaaaaattctcatggatcccagtgttgtctttttatattacatatatatttaaaattacaaatagatatgaaactatgctgataaaagaactagatttagacattaaatagagataacttaaaaaaaaaacaattgcaatgcccattaggggatcttcttagatccaatgaaatattcagtctcacaaaactcacagaccacacgtggcaccagtctacttaaggatgtaggacggcaaccacagcttcccagtggatttaagtcaggtcttccttttctgtcagagttctcccagcactgttatcagtctacaccaaagctttatcaccattggtgattttgtcccccagaggacatctggcaatgcctggagacatttttgttgtccctacctagggagtagaaggggtagtggttgctatcggtatctagtggggagaggccaaagatgctgctaaattttacaacctgtaagtcttacagtgcacaggaaagtgtcccataacaaagaatctctagcccaaaatatcagtagtgccattccctgggctatacagctgaccaggaactagcctcttagcctcctcttcagtcacatctcagacaggaggagatgaatgtcatagtgaatgagtgcaagagccttcttggcattgggcagtgagtccaagagccttcttggcattggcgagtgactgttaaacccccagggtttctttggttgggggtgaagaaaatgttttggaattagtgatggctgcacaagtttataaatatactaaaccaaggcaagatggctcatgcctgtaagcccagcactttggaaggccaaagtgggaggatcacttgaggccagtagttcaagaccagcctgggcaacacaacaagactgtctctactaaaaaaaaaaaaaaaaattttttgccaggcatggtggtacagctactcaagaggctgaggttggaggattgctcgagcccaggaggtcaagcctgtagtgagctatgattgtgctccctgttgagcaaaaccctgtctctaaaaatatatatacactaaacccactgaattgtatgctttaaaaggatgacttttatgacatatgaattatacctcagttagataaaggagaagaaaaggtttcagtagcttaaaagccccgttccctataggatccagtctttcttataataattccataaacatagctaggtccctgcaagggacatcctacttacaagacactgcactcagggaagccccaagatatggtgtccccatcaggtgtttatagttcatttatatatagtttaagcttagatgcaattttataagtcatttttataatgcttggtaacacaactgacaatctacctttagcacatttccaggggtacaaaactagaaagtggagcgtaagtcagtctcaaacaagggatttattaaaactttacccacaccaataaaattcaaactagctacattattaatgttttgctgaaattacatttctactcaagcataaatggtgctgttggggagttttttaaaaaaaatgtaatggctttactgagaaataagtagtgtacagtaaagtgcacataaagtgtgtactttgatgagttttgagatgtctacatctgtgaagtcatcctacaattaaaataatcaatgtatccataacccctaaagtttcatcttgttcctttgcaattcatgcttccttgagtataaacacagtaaagtgcccaaataatcgtacagcatgataaatttttgcaaggtctatacatccatgcaaagaagatccagatgaatcattatcgccaccctagaagcttctcctagtgtctggttccagtcactcgctctgcaactctctataatcactctcctgtttaacaacacaatagttttaactgaattattactttagaaatgaattctttcatctggcttttattccacatgagattcattcacattgctgtgagtagttgatcattcatttctcattgctgtaacatttttctattttggtatattaccattatacacttaagaacattttttttcattacacagcttatgagcatttgggttctttccaatcttccatttccatgtgttcattagccatgtgatactctattatatgaagtttctgtacagttttttgctcatttttatcatatacgggtcctttgtcaaataacatattgtgaatagtctctcccattgtttattcactctttagtatgttttgatgaacagaagttcttaatatactctaatttaaatttttattatttatggttaccacttttgtgaactgcttaggaaactgcctactccacggtcatgaaaatgtttttttgctgttcacatttagatctataatgtatctagaattggttttttgtgggtgcgtatggtgtgaaatagggatcaggataccttttccccccacatggaaatccaactgaatccatgagtatagcaggctgcttatattcct

SEQ ID NO: 96777 - DNA, 13313 bp, Homo sapiens
actctagaattaagactagttattgtcagttgtgtcccgcccttccctaacagggtcacgtatactcacccccatgtcaaaaacacagcgggcatcagagattgcctgcacgaaggtctcaggatcggtacagccgcttcctacatggaagctggggtaaaataaagagacgagacactgtgtcttagtatttcttaaaataatagcaaacactaggagaaagcctgtaaaactcaaactgttcaatgtcttgacctctagctatcccaccaaaatctcacctgacaccaacaacatcgatatttagctctttcgcccgttccaaaaggagcctgctggttctgagcgtggcaccgaatttcacactgagacgacagactgctttggaatcatcagtggcaatccgcaaaaccaacctacaagcaaggaaagtgcagcaaatgtctcatgatagatgttcacttatagccacaattaaaataaaaacaatcctgttctaaatactgtcgctgatatattctgtagtttgagtcccaggcttcatgactcaatgggggtttcaactactttctactaaagtatagaaatataataatcagaaatttaagtttgtttgataagaatccacatatcttatgctcccgatcttgccctcagatgggggaataactcactttgctttgggatgtgctctggcaactttcatcaactcaacttcactatcaaaagtcatcatctggactccattattagcagcatacttaatttgagatacttgtttacaaggatttgcatagataatcctctctggaggcacccccagactctgcaccaactgtatttcagtctgaaaaagaagagtggtgtcatgctatccatatgtggcttaacacgtggaataaacagaaaagcatgggaagttgtcatgtacccccccgccccatttgcctttagtgagcatttattgcccaaaaaacacaacttgtatctgcctcgtggggaataccaggcccattttatacaacgcttttgaggcctgctgctatcgcttaccttgctagcacagtcaaatcctgtcccggtagcagcaagggtcttcacgatggctttgctatcattacatttgactgcataaaagggggtgacacgagggagagcttttaaccacctcagatgtttctttagaatgtctcccaggtctgccacatagaaggcatccttatcatcctgaaacaagagtggtcacaggtgactcactagcagcctcaccacacaccacaccaatagccagcgaccttcattcccatcagtcacaatgaatcctgctcttttgagtctagccactgatatgagtatcaccattatcactattaatttaccaccagtgaattaatttctacattccataacaagacatgtaagcctcattgctcttccttagaccttgccaaagttttccacttgcctggcactctcagctgcactgccagcatgggcctcatatacttacagaagaagaaacttcattaattttctggtccagaatgtccttggcagtaaaaccttcatcgaggaagtggcagtcaaactcttcattaccaaagttgttcatgatttcttgatgttcctctgaaatgcaacaaaatgcaaatagagtggagaaattcacttagaagccttagcaatacaattcttaagattaacctgcaacataaatgtaaactgaatacttacatggaaaactaagagatggaattgaaagaaatatttccagcttctcacaaaggcaactctccaggaattccaaatccctctgcgtgtgcccttggaacagcagtgacaatctgagaaataaaatagggaatttgctgtctaccttaggaacacatcgagttgaagatggggcactggctgagcacacgcagagctaatcatgccccggatatgaaccactcactggcctggtcatcctaattattactaggcataaggtacatgattccataaaccttggcagtataaggacacaacaaaaaataccaggtttttccaaggcagcacactaagcatttcaaatatttgtaccaaaaaaatctagcatgcaagtttcagaagcttatctgcacttagctcactgatatggaaaaaagtcttataatggtctgatttatttcagagcagtttcagttccttagaaacttaaaatagcattatagacttttttattttttttgagacagagtctcacgctgtcacccaggctggagtgcagcggtgcaatcttggctcactgcaacctctgcctcccgggttcaagcgattctcctgcctcagcctccccagcagctgggattacaggcgcctgccaccatgcccggctaatttttgtggtagagacaggatttcaccacgttgtccaggtgggtctcaaactcctgaccccaggtgatccacccgcctcggtcttccaaagtgctgggattacattatagcctttatacacagccatacaaacatttcctacttccactaagtcttagaatgatttttactgaccaacaggcatcatggaaatgtctggagcatttgagattttacgagttaattttcatgtattagctgggtatatacttcttaaaaactgtaatcttcaagtcaacttatcacattgtattacagttgctgttacctgatcagaattcagtattttttttttttttttttgagacagagttttactcttgttgcccaggctggagtgcaatggcatgatctcggctcacctcaacctccgcctcctgggttcaagcgattctcctgcctcagtctcccgagtagctgggattaccggcatgtgccaccacacccggggcctggctaattttatatttttagtggagatggcgtttctccatgttagtcaggctggtctccaactcccgacctcaggtgatccgcctgcctcagcctcccaaagtgttgggattacaggcgtgagccaccacgcccggctagaactcagtattcttaaaccagcgttgcctaccaagtttagcaattccgggaatgccaactgtccttacagtcactctcgtatttgcttagctatgagaataatttggggctaacttcaccaaaaaagaaaaacaagcaagaacatcactctagtaacaataaaagccactgtattttgctttcatcaaatgtggcaccttgtgaaccagctttcttaaaattatttattttaacctttaaaaatttctgccaggtagagctttcttcttttccactgtgcaacccacttcagtgccagcagcctacgggcacagaggccaggcaatggttcggggacacagtttgctctggcatggggtactatgacaggcccagggtgacgggcctgtcataaatccaaacccatgcatagaatttgctttaaagctctatctattgtgactgcttggcattgtcaacctccgaagttgcctaaatcacccctcggagaagggaagagagtaacaacgctagcaaaaccatttttgttacagacatggttatatatttttgtttatatgaagaatatttacaatttaataataaataggctcatgcagtctcggactgggtcatttgaggccttattaaatatttttaaggcaatgttcaggcctaaacttggaaagttttgatttctttttaatacgccaatacttttttgcttttctgtatcttttaaggcgttacttaagtaacttacttgaatatattttactgaagaacacctttcggtctttctgtaacagctaagttatttaaaatggtcaatcaattagcacaagaggataatgttagaagagataggggctaattcaaacaaactttgaaaaaaatttcacaaatcaattaaagtctgcccaattttatgtttaaacaaagtcagccaacacattctttgtcctccccagacattcctgagaggttctgccttctacactttcaccaattatttcgacttcgcaaacagcacaatcagccttttctgcaaaccttagggctgtctcccctgtgtatgtccgttcatctaagccaagcttttccgaaatcaccgagtcattcacagtccttaaataaacacctctaagtcatggccgagcatctaatatcacagctactacagcaagactatcttagctctacccactctcgcgggtttccaaattggtgtcatctgctctgtagacacagcgaaaataaaaactggaaggaaactgaaggcgccaaggccggggcccgctcgtctgtaccaaggcgagcccaggctctgcgcccctgcacctgctgcgcggccgccagggcctccccaacggctccccggccagcgcgcggccgccgaagggttgggaaagaggccggcgcggggccgcagggtctccgggtgggtctcccctaggcccctccagccccgagctgtgaagacgggggcagaacgaggcgcccggatcacccttatccagccgcgggagaaccccgggccgggaggaagcggcgcctcaaggtcgtggcccgctcggcgaccacgtgtctctgcaggccggcgaggcgcgccgcacacgtgcccggggcccggggcccgcagcccgccccggctcccgccctcgctccctcccttcctccgcggccggggagtccctcacctcagagcgcccaggcgccgcaggccagccccatggggaagcgcagacgccggagcctgagtcgcagccgcaggagcgctcggccgcccccgccgcgcccgtcagcgcctggctcccgcccgccggagacgccggcccgaggtggcgccggagctgctggcagaggggcggcgggcggcggcggcggcggctacaggagggactgacaaagccccacggcacgccgctccctacttatagcaccggcgggtcgccatggagacgcaccagctcaaaccagccacgatcggttccggccgggacacggccgggggaggggcgggggcccggcggtggccaacccgggcccgcgcggagctggtggggcgccggcgggccgacgtcagccgagccgagcaccgcctgccccacgcgtggcccccgcccccggcttcgcgccccgccctccccgccctgcggccgcctctccccgccctccccgccctgcggccgcctcgccccgccccgccctgcggcggtctcgcccgcctggaactggtccgcgcacgcgcacgacgccgcaggccccggccccggcccgcggcagctgaacggcagagcctgtagctgcacagctgtgcttccacctggcgttcagtacctcgtgcccgagagcggaaaagggaaatcgcgagcggaggaccgatgtgctggccacgtgggccccgccgggccgactccggaccctgctgccgcccattcctccggtgcaagggacctggaagtgatcccggtgccgctctgctcccaccagctagggagcagaggcgcgggagggaaggggcgtcccgggggtcgccagcacgctgcgggcagggctggcagccgcctccacgcccccgcgctggaagcctcgtctttgtaacatcgaggtatcctgtaactagatgggtcctggcctgcggaggtagtttcccctgtgaagccagggactcagccaggagcgtgaggggacccggatcctgagtctccaagccgcccactaccctctgctttaccggatggaactcatcagtaactaggtatctttaagggcggctccctggcgcgctctgagagttacggaagtcccaaaatgctttgaccgaaaacgtctaaacagtgaatacataaagcaaaaagccgcgtgggaaattcgagtccctaggagcgcccaggggacgcctctggaggtggactgccactcactccaggccacgctggaatgcccgcaccagggaggcactgcacttgaattggggacacttttttttttttttttcatttttacctttcattcccttttggacaatccagacaggatatgtctctccctagggtggggatttcgactccttagggtgggagtacagccgatgaagagttaaggagaggagtgggtagatctagatctagccttgggtgggtgggggcggggttggaggagctcagagcactggcccagcgctgcccccaacttgctgtgtgctcttggacaagttatctcccttctctgggcttcagataacccaaggatccttacatatctttatagctacaaagccctgtgaggttttgaaaaacttccttggtacccaaaaccaggtctgaggcacagtcagtgaatacctgtttaatgaatgcatgcataaatgaatgaatggatgatccagctcttcctggagcaggcacgacttccacagaaacagagcaaacgctagccgtaagcagaagtgagtcttcttcctatgtgaagggatgtgggggtggtacgcccctatcaactttatctttacatagtccttgagcgcccaccgggcaccgtgttccccggactagagggagggagaggggggttagctccacccttaacaagcttaattcttgatgagattaaccatcaaaacccatcagagaacgttatagctccagcgctgaatgagacatctttgattctgtggtgatgcggactttgtgcctctctgtgaggaatcactttgttccaatgacgcaattttcctcacactccggaagtgtcctgcactgccagaatcgcccagcttcccggcacacctatcaaccagtcgttcccagcactgcccagtatgcagcctcyaggcagagrgcctggatgtcttggcaggtagggttcccctagcagcctgggggtggtcagatagaaacattaactggaacgtagaggccagttcttggctcagggagccaggagggctctgactgttgcacatacaagccactcacactgctatcgcccacataccttcctctcccgccagcccaccccaaagcccaaactcctgcccgcatgctgggaaggtgagcccttgcctggagagcccagcaggggaaatagaaggagggaaggaggcctgctccttccccrgagctcygctctgcggctgcaggaagacccgcagaggccctgggcagcagaactgtggacagcaaggctggagttgtgaaacccaaccactcagctggattccagaagctcaggtggtggtgactaaacctggccttacttaaaatgcatgactttattgtctttcaatgtattttcagtaaacttcatcctctccattactattttcttttcttcggaaacaagcaacagatctttgtaaaaaaaatacgtgatgccacgcacttaggaatcaccctcatgtggagatgagatttcttttttattttttttttctgagagtctcactctgttgcccaggctggagtgcagtgacgtgatctcgtctcactgcaacctctgcctcccaggctcaagcgattctcatgcctcggcctcctgagtagctgggattacgggcatgtaccaccgtgcccagctaatttttgcatttttagtagagatggggtttcgccatgttggctaggctgatctcaaactcctgacctcaagtgatccacccacctcggcctcccaaagtgctgggatgacaggcgtgagccactgtgcctggccagagatgagacttctatgtgtggtgctaaaagagtgaataaaaacattagatactacactggacatgcttctaagagcttagtcatctcacctaagttctgggaccaactcccattttcttaggattccttgggcccccttaccacccccccgccgctctgccccgctcattatgaaagtttggacatcactctctctctctgggttccagactacctttctgaaaatggggtggttggactggctgaaagctcaggttcttctttccttctaatgttctaagaatctacttatttcacagagttctgtataaatccactgaccaagttttctaaaccaaaaccaaaaacatgtctgatgaaggaagtatcttttttcttctttgctaacttacatgaaaaggcttataaaggtatatagtgattgcagacttaagcagtcacccttatcattattattattattatttgagtcaagaggcttgctctgttgcccaggctggagtgcagtggcgcaatactggctcactgcaacctctgcctcccagtttcaagcaattctcctgcctcagcctcctgagtagctgggaatccaggcgcccaccaccacatccagctgatttctctatttttagtagagatggggtttcaccatgttggccaggctggtctcaaactcctgacctcaagtgatctgcctgccttggcctcccaaagtgctgggatgataggcgtgagccaccgcgcctggcctcacccttatcaaaaagaagtaggtcacatagaagacaataaccagcaagcatttgtgtatccatttactcagtattggaaagtttgacattgagagctttctggaaaatgggtttgggcgctgcttacgtgtccgtggttgtactctacttcaccaaacttcttccagaagcatagaagagtggactgtggagtgaggctcatgacctccagccccatgaggactttgggaggttagcttctgccctggcaagggtgccctaactcaggacacctgggtaatggggactagtcacagatgctctagtcccatctggatgtttggccaaaaatagttttccttagctcagtcactcaccagtcctttaaccttgccctttgaatggttttaggtgtttccgaaaaatccaatccaccctccaaggtggaaagtgtgccatctctgcccataatccaaatggcgtgcctgaggcatagaaagcagctttcagggaggccttccttcctctgagcaatggtggcatcatcagaaaagtggagctcctccaaaaggatctgctggaagcagaggacgcccatgtgtaagtggaagtcccaggatgtttgttttataaagtgttacatcacggccctaccttgccccagccctggtgtggctcactgggaagctgctgggaaaggagccaaataggaactaggccagggcctcctggagcccagaagggccctgggggcaggtcagtgggcacacacagttgcagagaagagggggcccttgtctggaggctgagagtttggaagagtacttttttttttttttttttgagacacagtcttactctgtcacccaggctggagtggtgcagtggcacaatcttggctcactgcagcctctgcctcctgggttcaagttattcttatgcctcagcctcctgagtagctgggactacaggcgtgcaccaccactcctggctaattttttgtatttttagtagagacaggttttcgccatgttggccaggctggtctcaaattcccgacctcaaatgatccgcccgtctcagcctcccaaagtgttgggattacaggtgtgagccgccgcacccggcctggaggagttcattttcatggggaaagtgatgtttatcattattttgcttcccacttccttgtctttttcagtgggcagaagtcagagtcccattaagcctgtaccgagtcagtattcagacatgccatccgacacgtggacagaagctttgccatctgcctacttggcttgtctgtttcaagcccttcactggtggccctgggtccacagagtaaagtccaaacaccttagcctggcacccaggaccctctgaggcctgccctgcccaccctcccagcctcttttgccactccagctccctgagccactgatgttccacagaccctgcccctgccatcgtaacgtgggtcacgtggtgtgggcacctttgtttcctgcctccatcctgccttcccctccccgcaactctccctttgaaatcaggaccatgattttcttctctccatatgttcagtttctagcctggttcctggctcacaaagccattcaatattgtcaagttgaaactgggtttagtagcacctgtgggctattgggaacaaaagaaagcaagcgaggctgtgctgaaaagtggtcatttgtggttgctatacgagtgattagctcaggagaatttctccccacgtgctatctaagattaggggaacaaaagaccctgggtgttcttcctttagtcagttgtttgttgattcattccatacgtgtctgctgagtgccacctgtgtgcaagtggcaggcaggacaagggaggaccctctgtggctgggccgggttcctggggaccagcagggaattgataagagccaagagaagcctcgcttttacccagtgcctaaggaaactgcctcttttgttttattttctcctaagcgcctggtgactccctctgacccaacaagttgcagcacctctgctgggctttgccactgccccatttttgccagagcctcaccctggtggggccccacctctgggaagccccagcgcctgcaagattttttcctctcgtgacagggagcagcatgcggagggcccttgcacaacctgggtcttcaggaaggtgagtgctctgcccaggggcagtgtgagctctgcgtccctgccaagtcagaggcgggaccatccgaagggcctgtggctggggtctgctacaccgagccttgcgggccctccaaggggtagggtaccctgagggcagtgctccctgtctctgttctaacagctgtgagcacttgctctgtgccagcgcccctgccaggtgccagggagaaggaggggaggccaaggaggtccctgtgctccaggagctcatggtccagaggggaggctgcccccaggcttgtgctctctaggttctggtccctgggacagtggtcacacagacaaaggaggtggacgcagccgagggagcaggggcctgggtttggaaaggctcgtccagggccagggagagttagggaggggcctgcagcacccagggcaagaataagacctgtgggcaccaagggaggctcccgcccacaagcccagctttcctctgggagaggactgagggctgtgaaggggagagcagaggaggagtcactctggggagcagcctctcacccccaggggctgctacttcacccagctccagcctccatcagtccatccaaatcctggctgacagcagggccccgccatcgtagaaggcaggtcggcctccacatgcgggcacagaatgtttccctttggcattccatgccctgtatggctcagggcccaggcaggcagttcagcagagggaatttagcaagagaactagttacagagatgacatgtcttacagctgcaggaagccactatcacccagaggactggggatgaaaggggacgagggtccccagcagcgtggcagccacctgtgggctgtcccagagaaacccactgaccaccaagggcaagcagctagtgctggggaggctgcgaagccaagagagggagagggagatggagacagagaggagggacaggagccagctctcccctccgcccatcctccaggctcccaccagcacttcccagtcagaagcctgttgacaagagatcccggtcagtgtcattttccaaggccagccctgtccactccaccagagaaacagcagaggcacagtgggagtggggaatgggtctgagagcgggcgggcaagggcaggctcggccccttggcggtaggcccgtcagagtcttccttctgccttcttgtaggacagtttctaaccagagttctggtaagcactggtgacatttcacattggcttaagcaataaggaaaagcagtcatctcacgtagcaacgtggcttggggaagggagtctccagtttcatgtattcggagcctcaagaacaacgttgaagacctggattcttttcctgtttttgcagttccttgcccaggtgttggcccagctctcttcatggttccaagaaggctgccccaggaaggcttgtggacagagggagaagcatctcttcctctatgtctctttttatctaagaaaccagtttgaccagcatccttcccctcggctccccaggaggaatgcacggatcccttcgccttcccccatccctccatggttgactaaacccactaggatccactcttttgcgtggaaatgggttcaggcctcccacgaagagcatgaagatgccctctgttatgggttacattatgtcccctgcccccgagaccgtatgttgagtcctaaccctagtattgcagaacgtgaatttattaggagatagggtctttatggaggtcattaagttaaatgagggtgttagggtgggctggtgtcctgatataaaggggaaatttggggctgggtgtagtggctcacacatataatcccagtgcctcgagaggccaaggcaggaggattgcttgagggcaggagttcaagaccagcttgggtaacatagggagaccggtatctataaaaaaaattaaaaacaaaaaaattagccgagtgtggtggtgcatgcctgtagtcccagctactcaggaggctgaggtgggaggatcgcttgagtccaggaatttgaggctgcagtgagccataaaaagatgggggacgatggagacgcacagggaaaacaccttgtgaatgcggcagagataagggtgatgcctctacacaccgaggaacttcagagacaaccagtaagtcactgggagctcggggaaggcacagcgcagatgctcgctgccctcagagggaagccagcccgccaaccccttgatctcagacctctggcccctggaactgtgagatgatagatttctgtcgtttaagcacagtggtgctgtgttatagcagccctagggaaccatccactatcagaacaaaagcagggctggactgctagaagaaaggagaggagaatggcagaggatacccaccttggggctgaatctgagatcactccagggctccccaggttgttttgaagaatggagatggatttgtgcagggctcactgtagaagctcagtgcagcatgcgacgcttataaggctgcaatccccagagctcagtccctgaagagcgctgcattcacagacatcagccagcagacaaaccagtacctattgtccctgacccccagaatccagcagacatataaaagatggttgttaaccccactaagttttggggtaatttgttatgcagccatgcaactgaaagaagcagctac

SEQ ID NO: 96778 - DNA, 43028 bp, Homo sapiens
  misc_feature (1)...(43028): n = A,T,C or G
tatgtcagatggtctctggtccaggtgctattgtttttctatttcctcctcatgttagcttatatattagataacatccttttgagaagtttcaaagttagctttaaattgttgctatttctacctaaatgcaacgtgccttctagaatgcatgcacatgaaattcaacacagataacacgttttgaagatcctctcaccctcagggatagtgtcctgattttatttttgagttaattacttgactcttgccaccccagtttcttccaagccgtgatttagtgcatatttaatgcagactaagcatgccccaaggcatactcaccttgttaggtttttaaaaggaaaagattgacctcacataggagaaattagttaaattgaactttaagacaagtacgtggggttgctccagcagcaactgaaatgtattatagtagaatttcaccacgtatgcacctaatgtcttggaactcaactatgtctacaagtgcatgggtggtgggaggctgagaaaattggaggagacagtgaaaggaaagatgaagacagacagggagagaaagaatgaacaatcaaaataatgcaatgagagatgcaggaaagaataaaaagcaacgtgaagggtaattatgtgggaaactctaaataaatataatctaataataacaatgtctcttgcaatttaaaataggtaaataattaaaaatgcattacaataataccatacatattgaaagctggtaaatggaagatatattaacatccttacattttcaagaaagaggtaaaactactaatttacattaaactttgataagtcaaggatgcatgttttagtctctatggtaaccactgaaagaatacttaaaagagtatattctttaagtgaatggagaggcagtggaatcataacaaaaacgcttcatctaacagaaagcaagaaagaagacaaagataatgaagaacaggacaaacagaaagcaactagcaagataatagatttaaaaccaaatttatttgtaatggcactaaatgtaaatggaataaatgctccgattaaaagatgaaggttgtcagataagataaaagaaagttcaattaaaagctatttcaaaagaaatatctaaaatataagaaattaaaaggagtaagaaaaagatatgccatgcaacaaaaggtgatgtccttatgtttatatgagacaataaatgcttttgtaaaaccaaaaagcattgctagtgatagggacatttcataaagatgaaagttttgatttaacagtaagatatataattataaatctgcatgtacctaatgacatctcctatatgtgaagcaaaaatctaacagaaataaaaggagaaatagaaaaatttgcaattataatagatttttaactgctatttctctcagaaaatgagagaaaaggcagacaaaaatcagaaagaatagaaaagatttaaacaatacaattaacattttatctaaatgatatatggagaacattacaacaacaaatgaataaagtcctttttcaacaacacatcgaaatatttataaaacgtggttatatactgtgacataaagtttcaaaaaacttcaaagaataataacatacaatgtatttctgacagcagtggaatataagtggaaattatagatagatgatagatagatagatagatagatagatagatagatagatagagagatagaaaactagaaaatctccctgtgcttgaaaattaagaaacacacttcttaatattccatgagaaaaaaatcagaaatcacaataaaaagaaaatattttaaactaaatggaaaagactacatataaaaatatgcagaaagaacttccaatttctggtaatgttacagttgtatcagactgacccttttgccaataacaattacgaaccttagacaaaatttgaaaaaacaattctttgaaggcaatgcagaacagctaagagcaggcagaaactgcaggagatatagctcttgaatgaagaaaatcacactgggtgatatccacatttatttggcttttctcctgaaggaattcccctagttcacaacaaagagcaaggtccatcagcaagcagctattatattagaccgtggagtgacattggtgttcaagactgccagagcagctgaaaattgaatggagagggaaagggaacaggtgggagaaacttaaaaagctggtacaaagtacactcaaatatctggctgacctctgaactatactctaaataaatcaaaagaaaaattagcattttaaagtaattgaaaatgaaaacatggcagataaaaagttgtgggatgctgataaagcaggaccttggggaagatctacagcactcaactccattagaaaagacaaaaggtctcaaatcagtggcctctgtttctagaagaaaaaaaaacccaaagtaaacagaagacacgaaatagtaactatcagaacagaaactgatgaatttaaaaacaggatcaataaaaattgattcaaccaaaaactgcctctaagaaaatcaataaactccttttaaatttattgaacatagactccaaaaatagattcacacacagatggtcaactgatttgagacaacgtgccatgataattaatccaatggagaaaagattgatttatttatttatttgagatggagtttcactcctgttgcccaagccggagtgcaatggcacgatcttggctcactgcaacctctgcctcctgggttcaagcgattctcctgcctcagcctcctgagtagctgggattacaggtgcatgccaccacgcccagctaatttatttttttgtatttttactagaaatggggtttcaccatgttggccaggctagtctccaattcctgacctcagatgatctgccctcctgagcctcccaaagtgctgggattacaggcatgagccaccacgcctggctgagaaaatattttttttcaacaaatggttctagaaaaattggacatctatatacaaaacacacacaaacacacacacacacacacacacacaagactaaaacctcaaccttctttcacatcacacacaaaaattaactcaaaatggattgtgaacctaaagacaaaatctacgactattaaatttctgcaaaaaagaaaaaacaggagaaaatctctgtgaccctggctaagcagagactttacataggacacaaaatgcacaaagatttctgctcttcaaaagtcactgtaaagaaaatgaaaagacaaagccacagactgggaaaaaaaaatataataaagggcttgaattcaaacacataaataaataataagacaaacaatccaatttttaaataggcaaaatttgaacacttaacatactaccacatacctactagaatggctaaagttaaaataggacaatatcaagtgctaacaagactacagagcaattacacctctcagtgttgctagaaggaatgtaaaatggtacatccactttggaaaatggttcagcagtttaatataaatttaaacacagacttaccatacagcccagcaatcccatgagtagatatttacctaagagaaatataaacttatgttgaactacctcacacccattaggatggctactataaaaattttaaagaaaatagaaaatagcaagtgttgacaaagatgtgggtaaactggaacacttgttccaggttgggaatgtaaaatgatgcagctgctgtggaaaacagtatggtagttccttaaaaaattaaaaatagaattaccatatgatctagcagtttctcttctgggtatatgcccaaaagaattgaaagcagagtctcaaagagatatttgtacactcatgttcataatggccttattcacaatggatgtaacccaattgtccatcagcagataaatggataagcaaaatgtagtatatacagactatagagtattatttaggcttaaaaataaagaaaaaaggaaggaattctcacatatgctacaacatgaatgcaccttgagaatattatgctaagtgaaataagccagtcataaaaagacaaatactgtatgattctacttatatgaggtacttagagtagtcaaattcatagagacagaaagtaacattgtggttgctatgaggaggaatgaagaattgttgttgttgttgtttttgttgttgtttttgagatgggagtctcgctccgttgcccaggctggagtgcagtggcatgatcttggctcactgcaacctctgcctccttggtaccagcaattctcctgactcagcctcctgagtcactgggactacagctgtgtgccaccacaccctgctaattttgtatttttagtagagacagggtttcaccatgttggctagggtgacctcaaactcctgactttgtgatccgcccgccttgacctcccaaagtgttgggattacaggtgtgagccaccacacccggccagcattattgcttaatggatatagtttcagttttaaaagatgaaaagagctgtggagatggatggtggtgatggctgcatagcattaggaatgtagttaataccactgaacaatacacttaaaatgcttaatgatcaattttacattatatgtattttaccacaaacaaatttgaaaaaaagaaacatgttgacacaaaaaacccgtacataactaaaaaatagattatattggattacataaaaatgtaaaactttggtgctacaaatgataccactaagaaagtgaaaagacaagccacataatgggaaaaaaacttttgcaaatcaagtatctgataaggggcttgtaaccagagcatataaagaactcttacaactcaataataaagacaatttaaaaatggataaaggatttgaatagacatttctccagagaaggtacacaaataggcaaaaagcacatgaaaagatgccgaacgtcagggaagtgcaaataaaatcacaagacaccactccacgctgggttactatacttaaaaaaaaaaaaatcaacaataacaagcattggtgaggatgtggagaaatcagaatcctcatacattgcagttgggaaatggaaattaccagtaggggaatgaataagtaaataacagcatatccatttgatggaattcattcgaccactgaaagcatagtgagtgaacgatctcaacggtgggctgagcaaagagatgcgtgtggcagggctatgtgctgtagatggggagttggaagaatttgccctaaggtgggctggaaggggtgggtagtgggttggggggagtgatgctctctttgatctgcaggtggtggaagtattgattcttagcctctgcctttcccccaagagatgctcaatctactatatccccagccagttcttgcaacccataccttgctgggctgggctcaaagctcccaggtggcacccaggcactgaggggtggactgttcggggatttaggcccttccagagcgccccctccacttccaggcacccccaatacacatacgattttttaaaataaatattgcaaacataggttcaacacaaaactcctaatgtgcactccactcccaaaatagattgagaactcctataaattccagcgttggcactctgggggcaactgagcccttctgtgcgctatgtcacctccccaaaggtcagggagagcagtcacaaaaggacagctctagccccagaacttcagttcattaggcaaagcctgaggttccggggcatggggaggagagaagggatcagctgaggagccaggaaacctgggttctgagcctggttcggaccctcagcaagttatttcttctctctgcgcctccgtttcctcttctgtaaaatggggcatgggcaaggcctggcaggggcggggctcgaacccgcggaaggcgacggcggctccggcccctcccggggcgggcggtcacgtgcgcgatcacgcggtcctacccggaagcgcgcccgggctcctgcaggcggggcgctgtgcgcgccgcgatccggtacgtgggcctccgggctgtcccctctgggggcggcgatcctccctccggagccccccttcaaccctcccggaagtgaggtagggtccctaggggtcccggagcggrcccactcctagcctcacccactccgggcgtgtggccgtgggccggtcgcttcctcgctcggggccaaagttcctcagccgtgaagaggggtggatgtcacaagtcaagcctccttcccagggtggccgtgaggttcgggggtggggggaggtggggatttggggtgaaactggacagaaactggcgtgctrggcaaacgggagccccgcggcggcgaactgctgactcgctctctccagagactcaggggcagggccgggctccgaaggtgtgggaccccagaaggagctgctgaagacgggaccaagggccacagggaggtttgctggggtccagatggtgaaagtgggcgctgggggtcgccccaggttggccccccgccatctggagctcctttcgtcagtgagtcccctccgagttccctttctagggcaagatagcgaggtgaagcggaagtctcagtgtgacaccggcgaggttctcttcccagcagcctttgggaagcatccccctgtttcgggaatatggcattcgggccaatcatgtgggtgatggagcccgtctcagggttcggctgctaaaggccgaactcgtaacagcagtctctgtggcgggtagtcacttgcctcttactggctcacagtgcttgacttcctaattaagttttctgttgttcctgccctctattcaaatatgaatgattccggaaccagattgattaatcctgttatttgaagaagggaagctgggaaataggaataatgatccccacacctatgtaagaacgcagtttgctaaggttactttgcagcttgcctggtcactcccatgatctaaccctgtagggaggtagagtaggggatgttgctctgtttctccgcaggagtttgaggctcagagaggtttatgggacttggcaaagccaaaactagaacctggtcccagatgcctttcctgttagtttccttccattcatcgtatcatcccaggatccccactcccttcaccgggactgcatcctcaccacctgggatgtgctatgctgtctcccgtcagtcactcctagcaagctccctggggctgcttggggagctctgagtgacccgcagaagtgagagcacttcatgggaacaaaggaggaaggaacaaaagtgggcacctgctctgtgcaaagggctgtgctggccgggttcctattctccattatgggaggtgaggggcaggatcccagatatgttcttagcagactgcctcagggcctggagagaccagggaccacgcagcccttctccagcttgtcctttctcaacgggcagcagtcaagaccagggcatctgcctgccctcatattctctctgttttaagyatttgcaggaccagggatgctgtgctgctctcccatgagccagtcaccgagtcggtctgctgcagccctttctgaacctctggccgtctggatgctccactgtgcttgccaaggtagatgatcttgccccacctggggaggacagggaggcaggcagcatccaccctggggctttgggaggcagatggaatgaggtaggcagtggactgagtgctactgggctctgcacacctgctcatcccctccccagccctgcatcctgaggccacccccatcctgatgcctcatctctccttcacccctcgaatccaggcaggtcatcacagcctgctgcatctttaaagctcctcccagcccccaccaaggggtgagcactcattacctgacacccgcacctagatgaccgccttcatgaccttgacctgcccatctccagccagccrgtcacttctccgctcacaaccacagcctccattccatagcccactgctccctaacccatacactctggtcagctttgtcacatgtacctgggagtcccagagcagcctcttcaggtccacccgcctctcccagcaacctccttttcacacctgttgcactctcagtgtctgccttggcattgagtaattctgtgggaataggctgcattccttcttcactgtgctgttatgtctcctggcatttgccataaataccttgggaccagttgcaccaagttagtttgggaggaattcagtaaggaccactaagctggacatggggatgacggaacacaagacctggagatgctgtgatcctcccaagaaaactggaaatccacttgtgtgagagttacagcagagcttcctaatcattgtcatggcttagcgcacataccacatgattatatctgcgtgacaccctgaggcacataagaggatttgaaaccactgcctgaggcctcttagctgcagcagccagcctggagcactgtcctcaccagcctggtcaggctgccccaagttttagaagatcgagggtttgccgcacgcagagggccatggcacacagtgtgggaagctgtattaaagatcttccagtgggtgaatagttaagacatttcttacataatcaagcacagagtgtgtggtgtgtgtgtgtgtggcgggggggtggggaaggagatttgggagggctgaagacactggtggctgtggccctagaagctgcagcctactaggtacaggggctttaggcagcctctgttctcaccatgaacagggagagcagcatttgaatgaaacttctgtggtgctgaagtaaattcaggggctttgaggctcatcttctggagctgttttttgtttgtttgtttgtttgtttgtttgtttgttttttcagacagagtctcgctctgtcacccaggctggagtgcagtggtgtaatctcggctcactgcaacctctgcctcccgggttcaagcaattctcctgcctcagcagttatcccgagtagctgggataacaggcacttgccaccatgcctggctaatttttgtatttttagtagagacggggtttcaccatgttggccaggctggtctcgaactcctgacttcaggtgatccaccccccttggcctcccaaagtgctgggattacaggcgtgagccaccgcgcccagccctggaactgtttttatctgagggagagatatctctggactgcccagagatggaggtgcaccagtgccctcygatccacaccaggcactaactggctgccgtgagcatggcctccctgggcattcggctccatgtctaggccaagacctsggtcccttcctgtgccagtctggttccagtaggccccgtggtgggtctgttgctgtgctgagagggaccagataccacagaggaaagggccccagccttggcatcaaacaggtctgggtccagatcccagctttgccacttcaggctgtgcctgtgtcctgctctctaaaatgggggtacctgaagagttctactttgtccagttgtgagggtgcaacaaaaatggaagtcccttgtgatgcctggtgtgcagaaggggctcactgaatgtttgctgaggttggggtcctcttcgttactcagactgagctcatagatgttggggctggaggctgaccttgaccttgcctttccctggcagatgaagtgcgtcttggtggccactgagggcgcagaggtcctcttctactggacagatcaggagtttgaagagagtctccggctgaagttcgggcagtcagagaatgaggaagaagaggtgagtgcagggtaggcagtcccaggaggggtggataggaaggaaccatacaaaactcccagcaggcagagaggcaggaaaacctgtgttcaccctgtcctgggcagcatgagcagggtgctgggtggggtccagcatccttcacacctagacccttatcctcaaggttggcctcttgatgctctgagctcggtgaccccacccccacaccccaccagtcctctctggactaaatgagggcaagaagaagtcgaattttatcacgtaacagaagaacttggagccatcagtttctgtaacctaaaaagtttaacaaggctgggcgcggtggctcacgcctgtaatcacaacactttgggaagccaaggtgggccagttgcttgagctcagggatttgagaccagcctgggcagcatggcgaaaccctgtctctacaaaaaaaatacaaaaattagccaggtgtggtggtgcgtgcctatagtcccagctacttgggaggttgaggtgggaggatcacttgagtccaggtggtagaggctgcagtgagccgagactgtgcccatgcattccaacctgggcgacagagcaaaaaaaaaaaaaaaaagtttaacgtaagctgaacacgttaattttttaatagctgtattaaggtatgattaacataccataaattgcacatatttaaagtgcataatttgataagctttgatatgtatatacctatgattctatcacaatcaataaaaggaatatatctaccacctcaaacatttgtaatcccttctttcccatccccatcgcataggaactgctgatctgctttctgtcatgatagattagtttgtatcatatggccttatataaatggagtcatacagtatgtgcttggatttagtttggttttggtttgactgctttcactcagcataattattttgtgattcatctgtgttgtggcatgtatcaatcrttcattccttgtcattgagtagtaatctattgtatcaggatgccaccatttgttcattcatttacttgttgatggacatctgtgttattttcagtttttgactawtacaaataaagcaactatgaacatgcaygtacaagtctatgtatacatggatgctttcatgtccaaggacagatacttaggatagactggctaggtcatgtaggtgtatgtgtaactttttaataaactgccaaacttttccaaagtggttgtgtaatttttgattccacctgtagtgtttgagagttcagttcctccatatcctcaccaacactatagtccgtctttttaattttagccattctaatagatgttcactagaatctcactgtgttttaaatttcatttccttaatgactaatgcttttgagcatcttttcatgtgcttatttgccatatcttttgcccagtttttatttgagttgattgtttcttcttcttattcttactgagttttgagagcttctaatatattttggatggaatcctttatcagatacatgttttacaaatattttctttcagtttgtggcttgtgtttgtattctcaatggtatctttcaaagagcagaagtattagaactcgagtttatccattttgcatttatggattatgcttttagtgttatatctaagaaatctttgcccaacttacaaagagttttctctacatattmttttgaaagttttatagttttaggttttatatcaggtctgatgatctactttgaatttttgtgtgtggtatgagctatggattgaagataattttttttttgcatgtggacatccagttcaacagtttaacattacaactcagaaatacttgtcattttcacttacataatttccactctacattttaaaggagtaatttattttgaaaatgttttccagattaattttgggttaaaaatatttttactggggatgcagtggaaggtgttcttacatttctgcagcatgggctgattgcctctctgtccctttctgctctaaggggtctcatcatccagccaatgagtgagctgactccacctcagggagtccatttaccatcaacatcacccgtgttctcatcacagtctttaggcaaacacaagatatcagagatcatagacattcaagtggttttatttaagctaactgttaggcttttttattttttaacagtcaatacatataatatttaaattaagaatttttaaatatttcagtttttaaactactgttacaactatgtcaacttaagaagcaaactatttggtggcctttctcttcctctttattgaaaacctggcaaaggaacgaactcctgaattttcagttcctaaaaatgagtagtgtaaaggaaaggtggtctttaaagttttttttttttgttaatgtgcaacacattcttttctcatcatataaataatgagttaattgtaggaaatttggaaatacaaagagatagtttttaaatgacctataattccatgacccagagctattagctttttaatatactttctttgggtctttattttttctatataattgggattataccacatttacagttttactgcctgtttttttttccacttgccattatatcaagatatttcttctatttttttaaatagtctcagaagcataattcttaatggaaacattgtactccagtacatgaatcagtgtatcatcctttatttaaccattttcctcatayggacatawatattgctcctaatttgctatatcactcttgctttaagaaacatttgtgcttaaattttatctcatgtcagataaaktcctaggataaatttaggataaattcctaaaaataaaaatgttgagtcaaaagccattcaaagatattgtactactttataattccgccaagtaatatatgagtatgctcctttatatacaccaaatatttttatctcccctgtattagtccattttcttaccactataaagaaatgcccaagactgggtactctgtaaaggaaagaagtttaattgactcacagttcagaaggctgtggaggcctcaggaaacttacaatcatgtcaaaaggcaaaggggaagcaagacaccttcttcacaaggcagcaggaaggagaagtgctgagtgaaggggaaagagcctcttataaaaccattagatctcatgagaactcactgtcacaagaacagcatgggggaaactgctcccatgattcaattacctccacctggtttctccgttgacatatgaggattgtggggattatggggattacaattcaagatgagatttggatggggacacaaagcctaatcatatcattctgccccaggaccctcccaaatctcatgtcccttttacatttcaaaaccaatcatgccttcccaacagttccccaaagtcataattcattccagcattaaccaaaaagtccaagactgaagtctcacctgagacaaggcaagtcccttccacctatgaccctgtaaaataaaaaacaagttacttccaagacacaatgggggtataggcattgggtaaatgttcccattccaaatgggagaaattggaactatggggctacaggacccatgcaagtccaaaatccagtggggcagtcaaatcttaaagctttgaaatgatctcctttgactctatccacgtccaggtcacactgatacaagaggtgggctcccaaggccttgggcagccctacccctgtgcttctgyagggcacagtcctcttcccagctgttttcacaggctggtgttgagtgtctgcggcttttccaggtgcatggtgcaagctgtcggtggatctaccattstgggggctagaggatgatggccctattcttacagctccactaggcaatgccccagtggggactctgtgtggaggtgtctgaccccacattcccttaatcactctagcagaggttctccatgagggctctgcccctgtagcaaatttctgcctggacatcctgccatttccatacatcctctgaaatctaggtggaggttcccaaacctcagtttttgatttatgtgcacccgtgggcccaataccacatgtaggtcaccaaagcttggggcttgcactgtctgaaacaacagccagagctatatgttggcaccttttagccatggctaggacgcagggcaccatgtccccagagtgcacaaagcagcaaggccctgggcccaacccctgaaacagttttttcttcctaggcctccaggcctgtggcgagagggcctgctgtgaagacctctgacaggccctggagacatttttcccattgtcttggtgattaacgtttggctcttcattatttatgcaaatttctgcagccagggcttgaatttctcctcagaaaatgggcttttcttttctattgcatcatcaggctgcacattttccaaacttttatgttctgcttcccttttaaacataagtcccaattccaaaccatctattagtgaatgcataaaactgagtgctttttagagcacccaagtcactccctgaatgctttgctacctagaaatttcttccaccccaaatcatctctctcaagttcaaagttgcacagatctctagggcaggggcaaaatgctgccggtctctttgctaaagcataacaagagtcacctttgttccagttccaaataagttcctcatctccatctgagactacctcagcctggacttcattgtccatatcactatcagaattttgttcaaaagcattcaatgagtctctgggaagttccaaactttcccacatcttcctgttttcttctgagccctccatactgttccaacctctgcctgttacccagtttcaaagtcactttcacatttttgggtatctttatagtagcacctcactctcygtggtaccaatttactgtgtcagtccgttttcgtaccactataaagaactgcctgagactgggtaatttataaagaaaaaaggtttaattgactcacagttcagcatggctggggagaactcaggaaacttacagtcgtggtggaaggcaaaggggaaacaaggcaccttcttcgcaaggcagcaggaagaagtgtcaagaaaagtggggaagagccccttataaaaccatcagatctggtgaggactcactcattttcatgagaacaagttgagaacagcctgggggaaccacccccatgattcagttatctccaccaggtctcccttgacacgtggggattatggggattacaagtcaagatgagatttgatggggacacaaagcttaaccatgtcatcccctcaccaaaaaaaagttctattcctgcagaaaaagctatagtcatgccctgcttaatgatggtgatacattctgttaataacaaactcatcattaggtgatttccttgtcatgtgaacatcatagtgtgtgcttacacaaacctagatggtgtagccaactacacacctaggctgtacagtatggcctgttgctcctaggctgcaaacctacagcatgtgactgtactgaatactgcaggcagttgtaacacaatggaaatgtttgtgtatctgaatgaacatagagaaggtatagcaaaaataaagcagtataatcttatggggccactatcatgcgtggtctgttgctgaccaaaacattgctcttcagtatgtgactatactgcttttacgatgagtttctatcaacatctagattcataagtgacttctctattaataaaatttgttcaagaaaatcatggtatatgaataattcagcaaatatttgaattcttgcctgtttatggaattctcgcctatctgtggggtattcattaaccaaatattaattgggaacctaccatgtgccagtctctcggggtaaagcagtaaacgtagcaacatgatccttgctttcatggaacttagagtctaaagaaggacattgtacagtgaaccagatggcaaataagtaccatgagttcagatagtgacaaatagtctggagaagttaaatggggtatgggatggggagtgacagaggtggagggcggtagcctgaggtggccagaaaaaaaaaaatctgagctggaaccagaatgataagtaggagccactgtgaaagctggacagactaactgtgggagctgggtacagtccttggttcccgaatgttggcaggaaaacctactccatagtgctgtgtcccacttgtacttcaatgctgcaccttcccgctggccagttgcctgtctttcttttcaaggcaaggtcttactcagcttcttgtagacttccccagctccaagttaggactgtgccttccccatatttcattcacgtctcctgaaatcttcttgggaagtctgctgttttcttcctttctttttattccactacrgagaatttgagttgtaactgttccactggctttatcccattttattcacacatttgcaacaaacttgtccagttcctttttgtttttgtttatttgttttgttccttcttttggagagctgagagaatggatggaggaagagcttatcaaagtcaatgcaggcttgttatggaaaataggaaaagtacagaaacatacttaaaaatagagggaaaaaaatcactcctaattcctctatccagaagtaactttaatagtgttggctttctcagtattttatcaatacttcgttttttctatgcattcacattcttgttttatttttagctacaacattgtatcagaggaattttccatgtcattgaaacactctaatattttaagtggctatagacccttccataattttgatgtgctgctatttatttaacwatttccctgatactagatgttaayattttttttccagttgtttgctrttataaattakgcagtagtgaacatctttgtgcatgtatctttgtcccaatctctgatcattttccttaggacaaattttccaaagkagacttattgcaaaaaacagcatagactttggtacatgctacaaacttccttccagctccccgttcagtgctccccacattccactgttgtaatgaggcccaattccttaatgtttccttctagattcagagcctaaacagcaccattacccagctggccctccccattcttcctaaccaccacccgaagtgttggggacagtctctttttgctcccctccctaccaggacagtgataccctcccaggagggtctaacactatggaacccttgatatcaaggcctgatcttgtcccttccttwgttcttggtgtctggcccactctaagctgtgaaattttcccccatttttgcagctccctgccctggaggaccagctcagcaccctcctagccccggtcatcatctcctccatgacgatgctggagaagctctcggacacctacacctgcttctccacggaaaatggcaacttcctgtatgtccttcacctggtgagtctatagctctggggcccatgttcctcttccctcagcttgatggggagtccacaggcctctcttatttggaactttagactcctttagaaggcagaaacggcatcttatcaaacccgcctgggacccgagcctcccctggcttgtctgcagagaccagggcaggtgaagggagtgcccttggggctggctgacactggcctgcctgtgcctgcagtttggagaatgcctgttcattgccatcaatggtgaccacaccgasagcgagggggacctgcggcggaagctgtatgtgctcaagtacctgtttgaagtgcactttgggctggtgactgtggacggtcatcttatccgaaaggagtgagtcttcaaagctggtcccctctgtcctttgccgagcaccctcgctgggccaggcagcgtgtgcccagcccctgtgaagctgccatttttcacatactgcccccagctgggtccctaggtcagagaaacagctcaagtgaaccttggagaccatctggtctgaccctctgactttatatctggtgaaacagagcagagaatggaactcacttgcctggggtcatctagctggttggtggccacatccaaactggatatttgagctcaggactctcagtccagtgctntttccatcctcccaacatcatcacccgtcattacaaatctggtctgagctagtcctctctggcttctcaagcttcagactctctctccagaaaaacacaaacccatgcacattcatacagtctcgtgaaggttttctcaggagacagaccttaaaacctgtctctgggcccacagtaaagaacttggggaaagagaatcatggttcagagtatacactgaggtgggagggaccccagaaaaggcttgtagttgaaatgtagacctagaaaagagaagttcgtagtatcaccaccccctgattctctaagatggattgggaagctgcggagtgtgaagctctgggactttagttttgtggcgatatgagcaactacccatattgaggcatttctcaaatgcacaaacattgtttcatgagtcattttagcccagataggtcatggtgtcagtggcaaatgctgcaggtggcagatgcctgttacatgaatcacagtggccagtgcagacgttgccagcatccgagatggctgcgaccctgagtagggccctgatgatggaccagatctttctgtgttcagtggcctctgtgtgagaagcttaagcatcaccctggctctctctagctggctttgtatgacatgtgtttgtgtgacagaggctgaggagtgaggtgatttgctcagctgcctgccttcckgctccgtgcctatcccaccccactccacagttagagctcggccggaaacctggccccctttcccagctgtgtgggcaggtcayatgggctcaccaagctctgatgctgagctgagactgtggtcctttggttgggtgtgggggagaccagctttcttrtgatctctcccgccctctctggctctgcccccaggctgcggcccccagacctggcgcagcgtgtccagctgtgggagcacttccagagcctgctgtggacctacagccgcctgcgggagcaggagcagtgcttcgccgtggaggtgactactgggcgcgggagtcctcaggacttgaagctgtcaggtcagagggggcgtccasctttaagaccatgttttaaccctaatgaatgaaggcacaagcagcccctgaaactcgtgtattcagagagagttgttctttctggccatatggagggttgggtaccctgatgggctttcccrtggtaaaacagctcgatcctggataacacakacttttaatgyaatttttgggttcactgtaaattacagraatctttgaagacagttccttcaaccctcccctccttttcccacaaaattatattgagctggaactggaggggaaagcagtggagaaaaacacagcgctaaaggcaagattccctgagtgcaaatgataccagcactacagccagtaaatagccttaggccagcagcagcataggagagctgagcctgcaactctaggttaagcccagccccaaaaagttaaagtggctactggtccttttataaagccctagtaaataaaaaactaaaaaattaaaaataaaaactaaagtggctgctggtcagtagcactccttgccttcctaaagaggtaaaccaaattctctttcaagcagtggttttcatactccagtgtgtgtcagaatcctctgtagggcttgttaaatacaggttactgggcctcactttcagcatttctcatttagcgagtctgggatgggggctctagaacttgcatttctttttttttttttttttttgagatggagtctcgctctgttgcccaggctggagtgcagtggagcaatcttggctcactgtgacctctgcttcccgggttcaagcaattctcctgcctcagcctcctgagtagctgggattacaggcacgtgccaccacgcctggctaatttttgtatttttagtagagacggggtttcactatgttggtcaggctggtctcgaactcctgacctcatgatctgcccactcggcctcccaaagtgctgggattacaggcatgagccacagtgcccggccctagaacttccatttctaaaaaattcccaggtgctgtttattgtgcttgtccaggaaccacactttgaaaaccactgctagagcaggaaaggtaaagatcaaacaaacgtgaactcacaactgaagaaaatcagatatggaagaaaataagccaccaygagtgagagtcaggaaaatcaatcaccaacagatttagatcccaaggcacttgatacattggaactattaggtatagaatataaaataactatgaaatatttaaaaatatgaaatgtagaatcacaaaatgagataagaagaaactctaaattgaccaggcaaatttgaaaaagaacacgtacagatattttagaaaagaaaacatagttgttaaaatgaaaaactcaagggatgtgttaaatagcagatgagacatagctagagggagaattaatgagctggaaaatagatctgaaggaattcattctcatacccccactcattcactcttccaataaacatatagtacctattatatgctaagaggtgtgccaggccatgggaataaagagatgaataaagacatattcactgcccttgaggggaaatcagccatgtatatactaaaagatataataaagaatcctggtgccatattaggtttttcatcaaaagctatggtggcacaagagatggagtggtaaactctttctgggacattaggaaagacttcttttaggaggtgacctaatgccattagyataaaatccaaactcttcccaagcctaccaggccctgtgtgatctatcgctgcctatttcactctagcttcatcttatgcctctcttgtccacrcttactgagtgctagtcacatgaaacttctttaagtttcaggaaaactctatatttagatctgtccaatatgatagtcattagctgcatgtggctgttgaacatttgaaatataactagtgcaaattgagttatgctatgcatgtgaaatatataccagattttggtaacttagcacaaaaaagaatgtaaaacattccattaataaggcttttatatcatatggtgataatattttggatatattcagtaaaatgaaatatatcattaaaattaatgtcaactgtttctttttacttttttaatgtggtcactggaaacatttaaattatgcatagggcctttcttttatttctgttggacagcaccattgcaaactctgtccccatctcatggcctctgaatatgcagtctccttgacttgcagtgttctctctctccctctttctctggtgggccatctggttgtttagatattagtttaaaggtgacctaattcagggacatttctttggacaccctacccaaggaggtctctgctatttctctctagcctagtgctgtgtattttgtacttggtgcttacttacaaatggcacttactttatttccttgtgtattgccttgcctcatccactggagtctagtgaccagacagtaagcctcaggaaggctgggacctggtgggtcttagtccccctgtttccaagtatctggtgcagagtccaagctcactgtggacagagtgaatgtccccactagcccagggcttggagtggggcaaggttgttggtgatatggcttcctctcccttcctgccctggctaggccctggagcgactgattcacccccagctctgtgagctgtgcatagaggygctggagcggcacgtcatccaggctgtcaacaccagccccgagcggggaggcgaggaggccctgcatgccttcctgctygtgcactccaagctgctggcattctactctaggtgagctcaaggtctggcatgtggtggctaaaggctccctggccttctcactcccctatggcctctgcctgaaaagcaccacctgcccagccaagaatcacctcctccatgaagcctgaaaccttcccagatttgattctccaacctttttcagctcacccatttctctgtatcattccttcctggaacactgtcttagagtctcaatctagaacttccttttatgttgttcttggtccctggtgctttcccactgctaaatcattttcttttctttgttctatacaaccaagttttattttgaaatttgacgagttaattaattgtatttgtgccttgcccatctccagaagtacattgctccttgagggcaggggccaggctccacactcctttaacctgcctgccccgtctcctgctgggcatgtgctgatgggtggccatgctcctgtgtctgcagccacagtgccagctccctgcgcccggccgacctgcttgccctcatccycctggttcaggacctctaccccagcgagagcacagcagaggacgacattcaggtctcagggcagctttctgggcagagggaggccattagggaggtagttcagaaaacctgcctgragatggtgggcaggctccccctggggactccatgttttctaagtcacaattctgggtgtgtggttgggcgtgacttctttcccactgctttcagatgtaaggggaattctggagtgcacatggtccagtgggttaaaagtgcagatttttcaagtcagccatggttcgaaacccagcttcaacacctggctgtgtgagctgagcccgtacttgcacccccagagcctcagtgcccttatctgtgcaatgggaataacaaagcatctacttctcaggggtatttggagggacaaaaggggtggttcccacagaacctggcactgcctggggcatagtgaatgcttagtgagtgtcagccaccaccatcgctgttgacctcatcaccaggggtagtggtgggttggataccattgtgttggaatttctcgaatttccacagaacagaccgcctagaatcgaatccctgggaagtctgaggaccacacacccaggactgcacccggaacgggtggaggggtggaggggtggaggcttctctgtgaagcgctgggaggcagaaggggtggagggagccaggtcagataggagctaaccagcctctcccctgccctgcacagccttccccgcggagggcccggagcagccagaacatccccgtgcagcaggcctggagccctcactccacgggcccaactdgggggagctctgcagagacggtgtgtgctgtgcacttcgtggagtcaggggcaggaggggatcggcctctgcaggcgaccaggcctttcccatccctcctgggagagcagggacagggttgagccagctgggagagcctctcaacctgagccaccttctccattccaggagacagacagcttctccctccctgaggagtacttcacaccagctccttcccctggcgatcagagctcaggtgaggaccggaggaaagcaggaggaaacaatagctagctgcgagcgacaggcagcccaggacatctgtcttaggctycagtggaccyccgtgcctcctaaggcttgagtgcaggtacccgtgttcctagagcacaggacgctgtctgcggctccccatcttccctgccagctccagcctgaactcaaggaytgttaagaccactccactgatccctaaagctgttgatgacaagttgattcatttaaaacttctgtacatgcattctcagactcatcttttttgtaattaaaattaaaaattaagttaaatttagtaataatcatctaatttctatacattctaaaatatattcagcatctgtagtttatactttgtttctccaaagtatgtgggtaaacaataaaaaaaaactataaatattcaaaatggttgaggtgtggtggctcacgcctgtaatcccagcactttgggaggccgaggcgggtagatcacctgaggtcaggagtttgagactagcctggccaacatggcgaaaccccatgtctactaaaaatacaaaaattagccaggtctggtggcaggcgcctgtaatcccagctactcgggaggctgaggcaggagaatcgcttgaacccgggaggtggaggttgcagtgagccaagatcatgccactgcactccagcctgggcgacagagcaagactctgtctcaaaaaaaaaaacaaaacaaaactacaaatattcaaaatgttaacaaaaaatggacaaccttgcttagagaagtagataaaccaaaatccagactgttgtggtcactatgaataaacattacatttatttctgaagttcttaggtaaaaaaaaaaaaaaaaaagggtcctgtggtccctccacatcatctgatggaagaaagaaggccagggtttcaggaggagaaacctactggggactaggatttgaaaggaatttattatgtggctgcttttaacccaaccctggcacattggaatcaccaggcagcttcagccagcccaattaagttacagtctgtgggcctgggwcccaggtgtgaatacttctaggaaattttcccaggtgagttcagtgtgcctcgggtgcaaaccactgctgtgcacagatttaggttacagcatgctttgccccctggctgcatattgaactcacctggggatctttaacaattattgaagctgagcctgtacccggagatgctgactcagttggtctgagctatgccctgggcgtcaggattttgtaaaagtccccaaatgattttcgtgtgtagccaaggttgacaaccactgggttagatgcttttaactttaggtctggctagaagcctaggaccccctgagactgtgtgtgaactcactgatgcctgtgcattcctggggtgagggttcctagctatcttcagattccctgagctcttgatgagcctgagacctgttgagaagcagagttctgggtaatctccgaagttcctcttaccactcccttcctcattcatcaccatcttcctcccagtccctctctcttgatagtggttttttatgccttaaaactgtaaaaaataatgctgttccaccgtgcagagaactcacaacttacaaatggtttgggttgcactcatccatttgtaaatcaggtgtttaagatgtaggaacacacttcccccaaagaaacatgattataaatgagggttgtttgcaatgaaatataagaggtaacagtattattacagacacataatatttcagatatgtggtgggttcagtaggtttttgtgcgttatattaggaaggaaatccacctcaattcccagcacacagcaggtgctcagtaagagcttgcyggttgaataaatgaatgggcaaacgtggactgtgtgtgctgactcctgaggggcgggttgaggcctgaaggaatacaggggacagaacaaggaggggattgggggcaagggaggggggaggaagatgcccctctaccccctgaccaccattaccaaacatgtcctcaggagcttgattctcagcagctggctctgggggcagcttctctgccaggcccaggccgccttagccctggtactgcagagttcaccttgtgcctgccaacttaggatgaaggggtgttgccccagccacattagcacccctgcgtggagctggcagccaagggctgaggttgtggggggcacctgggccccctaccccatgctgttgagccattgcttacatctcatggtacttacatcgttatgttattacctgtggcctgcaggtagcaccatctggctggaggggggcaccccccccatggatgcccttcaggtgagtttctccygtgcctgcctgggcgccagctgatctgagatgccgcagtgagtaytgggggctctgagggtttygcctccagggtgactctacccgtgccagccctcctcctgcccaccccagggctggtcagtgcaggtgcctgtcctggtgccagagctcagcccagaggcagggtccaggaatgggctgtgaggggtggcgaacttgcccctcccctcccccaggtgctgtccctcagctccattgttcttgggagtgaaagtccaatagaattttttttttaagtgagcatgtatatttattgtagaaaaatcgggaaatacaaaagtaaactataaaaaagggaataaaaattactcttaatcccgtcctcaaaatgagattaacatcttggggtgtttccttctagtctttttttcctatgactttacacacacacacacacacacacacacacacacactacatatgtacacatgtgtatttttaaaatcagatttggatactaacgtgtttcattatacttttttatttaaacatttttccatttcctaagcactcccacagtgtggtttgtaatgattggkagtccatcacatgcatatgttatttatctagcaaatccccaggaaaatcgcgtcatgtgtccagtgtttgctgttaggtatgacactgaagaggaatttttgtggcatctctcatgatttccttaattctataattttttgcactaaaggctttcttgcttagatccctctgtaaggctggagccttgcccatttggtcactttatgcctcagtttccccaatttgagtggctgttgggatgttctgagggtgattgaaatgatacaatgttgaacattagatacctccatctgttgcaaatgtggggaggggacctctccccgtccactccccatccacgagtgtttccctgccttctcggtcctctgtgccaccacccagcccctctgcccctgcccactgccctgcttggcacccgggccagactctgggcagaaaggcccaggagcagctgagggagaggggcaacagcgaaactggagctgcgagggcaggttcagcagagtgcaggaatttaaaaactggagtttcttggagctaaaaatgattatttcttgtggttcacagatagggccgcaatgggtgggtccaacttagggatcccacctctcactgcagctcttcttcctctgtagatagcagaggacaccctccaaacactggttccccactgccctgtgccttccggccccagaaggatcttcctggatgccaacgtgaaggaaagctactgccccctagtgccccacaccatgtactgcctgcccctgtggcagggcatcaacctggtgctcctgaccagggtaggagagcccctcaccctgccctgatgatgcttagggttggcacgtcttccccaggggcagccccgttcacccgcctctcggcccttaccctcagagccccagcgcgcccctggccctggttctgtcccagctgatggatggcttctccatgctggagaagaagctgaaggaagggccggagcccggggcctccctgcgctcccagcccctcgtgggagacctgcgccagaggatggacaagtttgtcaagaatcgaggggcacaggagattcaggtgagacccaagttccagtcctccccacctggggaagaggcagggctggcagcagggtacatccggtccacagcagctgaggggccartgggcctgggttcctgtccgggctccacctcccccgggcctacgatccttgttttccctattatgaaatgatattgaaaacttagctgctttttggttttcagaatctttttatgtgtgtttggcagaatacgaattataattccccttttttaggtgtggaaactaaggcttagacaagttttaacttggccaagattatgcagctcatgagcagtggagccagagcccggatgcagtgagcaagtgcagtcgggatccgcccgtcacgggcttcctctctgcagcggggctgtgtccccgggctcacagggcaacacagggatgtgcaggtcacggctccaccccacccccagtgagcttagggcccaggtggggagctgagaccaggagacaggtgagaatgtgcaggcagtagaaacagtccatcaccccgtgctctgacaaagcccagatcagggcctggacggcagtggggctggtggggcttgactctggatttaagcagtggaggcgcctggtgtttgaggagctgggacccattgtggctggagtgcctgtcagtctgaaggctgcaggattggctggaggaggcagtgccacatcccgcagtgcctcagggtgtcctaaggagcactttcactagaacaccaagttcttctgctttatagagatcccgtgaggccgccccctgcatggctaccccatgcccaccccataccctcccagcttctgcagcagcacctcctccgcacaccccagccgctgccctgtgtgtgccccccaccccgaggggctggcctggttgctgtgacggtgctactatgtgtgcctgtgcccgtcagacagcgagcccctggaaactgccctttaaataaacgctgctgagtgactagaacatggcacactgaagtctgcagggggctggtggggcctgccagggtagcctgcattggccagaagggcagatttgtctgggggccctgtgccctctcagagcctgatctgagaaggactttggcctggacctcactggaaatatggtcgggatgcaaacctgccccctgtcttccttccagagcacctggctggagtttaaggccaaggctttctccaaaagtgagcccggatcctcctgggagtgagtsktgggcctcaggacaaggggtgggtcgtgtgcccaggggactgttccctgggaggccacatctcctccaccactgcccttcatttatcagcaaaataatttcaagaaaggagatttcttcccacatacgtggagcaccgcgtggagaagctgggaagctccttcccattgcctgatcagctgtggctgcccccttaggtctttccatctgtctgtcctgggtgcaggagcagggtggtccacctgggagtgaggggctccccaggttggtctgtcctgggtacaagagcggggtggtccacaagggggaagggctccccaggtctgtctgtcctgggtgcaggaacaaggtggtccacacagggcgaggggctcccctaggtcccttctgctgtaatgccctcctctctcgtgctcaggctgctccaggcatgtgggaagctgaagcggcagctctgcgccatctaccggctgaactttctgaccacagcccscagcaggggaggcccacacctgccccagcacctgcaggaccaagtgcagaggctcatgcggtaagtgcagtgcggccccctgggtggccagggcagggtctggggcccgtacttccttcacgcagcccgagcttccctcggcagggagaagctgacggactggaaggacttcttgctggtgaagagcaggaggaacatcaccatggtgtcatatcctgacgccggggccccagccagcccaacaagcctcttggatctgctgcctctacacctgctccctggagggactatgggccccagggaagggggatatatgttccaccccatcagctgctcaccacctctctgaaggaaaataatgggacatagtggcccatgtgccttgtctataggaatacttcaagctgaaatttcaggaattcctcctgtcccaaagttaattcacaaaagccataaagaccctttatgtcagtgttgcccagctggcaaaatggtagtaggtattccacgaggggtggggaccggggggggggttcctgtggtctagtttggttgaaagggccgttgtccttcttagatcatgacagtgcacagtggcatgtaaaagctctagaaggcctacggcaaatgtttatccctgtttcagaagccattcctaagactatttgacccttttattatggaacactaattttatcgaatactgattttccatgaaaattcatgtaaagcagcttttcccatatcatctctgaaatgtccagcccccagtctcctgaggcaggtcctcagtgggcaggtgaaaggatgccagagggcctctttagccaccagctgctgcccttctatggatgtctcttcccctcccaaatgggagccttccaaactctcatgatgaagtgtaagggtttagcaagatcacagtgaggtgcataggctgggcagtcagctaggctcactcatgaaccaagtggctgtgctcacactccagcctcacgtgtgtctgacttaaattcatccctcatgaaaatgatgcataccatgttcctgtagggccagaactgcccgtgtcaaatgtgcaagtgttgaggatcttacagcttttcaaggcctggggagcttggaggtagtgggggatctgaggaagcaaggatacagggggcttarctgaaatggaagctgctggaaagaggcagtcctggccctcctgccaccatgactgggcacagctagaagcccaggacagaggcaggccgtccctagctcctggcttgtaagcaccttractcagaccttcacctacctagaagacttcccaggcttggtgcacttcatctatgtggaccgcaccactgggcagatggtggcgccttccctcaactgcagtcaaaagacctcgtcggagttgggcaaggggccgctggctgcctttgtcaaaactaaggtaaccatttggacccagggcggggatgggtgggcctcagccaatattgggtagcccttcctggtgtgatccacatgcctggggctagcagagtgcgctgggcagcaggcccaaggaggcagtggccagtgccggcataaataaatgctcgacaagtatttgttgaatgagctagaatggagagaacggcaaggtccatcagttgggcatcagaatttaaaacaaggtgatttctgttaaggaagcattccctggaaattcttttattctccttatttaactgactgtttttcatgacaaagttgtatttttgatagggggaggacccctgccactctccaaaaaaactatacgtgtgtgtgtgtgtgtgtgtgtgtgtgtgtgtgtgtctgtgtgtgtgtgttcttttctttctttgttttggtgggggaggcaagtaaagtgtattctaatgtttaaaacaagatgggaagatgggtggtggaggcatgtgttggaagcccagccccgtctcccaccagttatgtggctttgggcagtacttagcccaagggtcagtttcctcatctgtagaaggaaataatagtgctatttacatcacagagttatgaagagtacatgagaggatacgtatcaaatatttagcatagcacgtagcacaaaatacagatacagttcattcagtacttactggtggcatcatcatcaccatcttcatccttgcccctcattctggagacagttggggttatcttggtacgtttctttctgttggttttctgtgcagtttgttgtagttgagatcactctgtatgtgcaactttgctaccatgttttcatttcacattatatcagatgctttccctcatgccattaactctttatagacatgatttttagcagctccataatagtccatcatgtgaatgtaacataatttattgaaccatttccctgatgtttagacatacagattatttctaggcttttgctgttataaataattctgcagtatacaccttgcatacatctgggtccccatctctgattatgtccccaatatggattcctagaaatggaattattaagtcagatgggaggaatgtttttaagattattgatggatgttgtcaaattactttcctgaaaagtacagtcaatccatggcagatttaatgagtaatcrcacggcgatgcagtttggagcagatcgcctgtccctcccgttaagggtagaggagagggctcctcgagtctcttcccagccctgagaggtggcagagagcccactgtccctgctgccttccctggggcacttcaccggcagcactggtgacagtccctgcgtcaggcaggaggacattcccaggggagctaaggcacgtggtttctcaggccctgtgtttccatctgaccccttggtgaactctgatttggacttcccccctggctcagcacatcctacagggtcactcacctgtgccatcagttcccagcctgaagggcactaggtgagtgggcgaccccaggcagaggaggggattcaggagaccacaccttgttctcctgtgttcattaatgatgtccctggctattctctggcctgaatgatcatttcactaatttattttttttttaatattattattttttgagacagggtctcactttgtcacccaggctagagtgcagcggcacaagcacagctcactgcagcctcgacctcctgggctcaagcgatcctctcatctcagccccccaaatagctgggactacaggtgtgtgctaccacacccggctaattattttgtatattttgtagagacagggttttgctatgttgcccaggatggtctcgaactcctgagctcaagcaatccacctacctcagcctcccaaagtgctaggattacaggcgtaagccaccacactagcccagttcactaatttatggcatatgtgtatagtaaagttacacaaagcttttttacatatattttgcccccacgctaactggagggtagtccatccatccaataatgatttattgttgagcctcctgctctgagccaaggcagtgcccgggtactaggagaggcccctggcactcacggagcttctcggctgtgccctttccttccttcggaggtgagagctgcccaggcagaccaaggctgggagagtggtgatgcttgctgtcttttccccaggtctggtctctgatccagctggcgcgcagatacctgcagaagggctacaccacgctgctgttccrggagggggatttctactgctcctacttcctgtggttcgagaatgacatggtaggtgaggctgagtccctgggccaggacgggccacacacacttcccgctctgtaactcttggattcctttcttctgaattgttgtctgtctgtctcatcttctcttcttgttgctggtaagcccagcaggttgggagccagagttcagaggtcacattttcacatgggcgtttaactgctttgtgatccctctgcccagctgtctggcaaactcttgccattgtccacgtggcatccaggcacacatgtgagcagaaaggcacatgccccactgtgagaaatgcgactcagaccacacactttgtcgctagtgcttccatgtcgccagcgtcacatgccaagtgtggcacatggtcatccctgtggcataggcccctgaactcaagagcataggcccctgcttgaagcagtgagccaggctgcctgaggagacactggtggtgtggctcggggccctggcctccaggccctgcactgcttcttctgggcctcactgttactgcagagtagggtccagtggggggagcttactatcattgtgtctccatccatacaacggggtcagggatccctgccccagccactgcacagggctgtgaggggtgcagtggctgggactcctctcctcctgtctctccctcctctctgtcttttccctttcttcgctttcctcctgtttctcttttatttgcatctcgcttgtcaccataagtggttgttccagctctcaggagtggttgttccagctctcaggagtgttcctcctccctcgcagcccttggtctctgggtccctgcactcctgtgccttcccctgcccccaccctgcactctttgttcactgagggtgacagccatccctttccatagggcagggcggttactggggctctccaccactgttctctcagttaccccctcacagccctgtaaagtggctggggcagggattcctgaccccgttgtacggatggagacacaatgatccggagatcagacgccatggccagggccaccgaggctgtaagtgaggaagccggagcccaagctctgctcccccggsctgcaggctcccagctttcctccgtgccctcagaagtgcccaggacgtgtgtacaacagaagtgctagaaaattcctgtgacctttaccttcacttctagggagggacaggagtctgtgtgcttgggtggccccgtggggtgataaagtgaggcagagctgtgggctggagaggccaggtttgaatgccagccacacagcccagccggtgccgtgggggcagccctgcacactagggagtccactccccctgcagggcaggccacggtgcccaggcaagcatcagctaagtgccatgttcatgcctggcacacacggcacgtccagcagatcttaattcccttccccaccttatcccaccctgggaattcccaattctttcagagcagaggcttgggccttttgtgaatgctctgctcttcaagacctgtatgacagccctgcagggtgccctcctgagcgtgtgtttgtggcctgtacaggtccaggtattgacggtaatgagagctaccctgccggcccttgaagctttgtatactttttctctaatgttcataaggtgactgttgtcattctgacttcaaagatgaaaaaacaaggtccaggcattttcccaagcacccagcgcacatgacagagccaagccaggccgcaagcccggtgcgtctgactcaggcccttgcactacccccacacccactgcctccctgtcctccctcctcaggggtacaaactccagatgatcgaggtgcccgtcctctccgacgactcagtgcctatcggcatgctgggaggagactactacaggtgacgctgcgttgggagccactggggacagatgcccccatttgggtgataagtgctcgcctctgccgggagcagcttctgcttcagcagtgccctacctcagacccagaaatccacgctgggaacaccttcccggctggccctgtgtgcagcgagggaggacgggtgtggagggtacatctgtgttcctaccaccttcctgctggcatggtcttggcagcacggggaacgtctgtgcccggcccagaacatccccactgctacctcgtagccaggatgccactgttaggtcagtgaggaaccggagcggttgtcaaggcccacatgcaggggcctagtgagatgaccgagggcatgggcatttgcttgcgagggcccagagaggcctctggcgctggaggagtgccacagcctcactcctgaatcccatcctccccttcctccccaggaagctcctgcgctactacagcaagaaccgcccaaccgaggctgtcaggtgctackagctgctggccctgcacctgtctgtcatccccactgacctgctggtgcagcaggccggccagctggccyggcgcctctgggaggcctcccgtatccccctgctctaggccaaggtggccgcagtctgcctttgcatcctgtcctccagccacccttgcttgccactgttccccatgacgagagcctcctgtctgcagtggccatcctgaggatagggcagagtgcccagggtggccccagggcttctaaaaccccacctagaccaccctccatgtcaggtactgagcaaggccccagatccttctctctggaggaagagggaagcccaggggtcctgtttgtaaaacaacggtggcaacagctcctcttmcagagctgyctctgcctttatcctgggagatggggaggaagccccatctctgctgttcccygcgtggaggaagcccacccagcaagctctctcctaccccaggtaaaaggtgctcctttgcctgggtttgaattccagcgctgccacttcctctctgcacctcctggcaagtttcttctattccccacrtttaaagcgatggcacctccrtcccagggtggtgtgaggattacccagtgtggtaggtgctcaataaatgttggtcattgttatcactgaagcccaacatgctagtgcttctagacccttctgtcagtgctgataagcccttgctaagtcccagccccttcatgcttggctggcgtctgccctagggctggggttctcaagcccctggccctggcccagagatttggattcccttggcggcygtggagcccagsctttgatgtctttcaaagcttctgtggtgcgccctggattgagaaccaccacccgaggggtacagcccctctcttccaaccgagaagttcctgtcccagaatggacccagggacaagagaccctgagagccctgggactgggagtgtctgctcctctgaggccaggaggccggtgctgggccagagaggacggcgtggcgaaagtcagcgtccactgcagcacaggatcagatggccgtgtgctgtgcrtgcaggagcctcgccttctgtgtcttyagtcttgagccaaaatttgctcaaagactgatctcttccttgcagggaacagctttggggctgggggaactagaacccacatgttggtctaaaccctgagaaggtggcagtgaggaagtatcccctcaggtgactggatctgtgttcctccttaacatcatctgatggaatggcaatgaaaagcrtggattgtggaaaatacagaaaaacataaaggaaaaaactccaatccycygagcccaccactgttcaggacccctgcttttgtcacctactatttccctttagtttttagcagcggctggatgtgatatgtctagtttaaccagtccccttgatctttctatataataaataacacaggagtgaacatcctgaatcagatcttagcagagatgctcacatgcggggtaactgtccatggtgtgtggaggggtcctcggaaccccctcttaggatcatctccacatactctcccagttctgagattcgttaccaatagcaggtttccgtcacactgcgatatcagagcagtgcaggaactctccgctccaaggggttttttcctcctaggggaacactctgctaagtaatgggcagagaacaaaggggctcctaattcaaggcaggcctaagggagggtcagaaagaactttagctggaggtatttacagatgtgacctcgaatccttggggattcttggaaaatgggcaaggtgccaaaagaggagaactggccaggccttcaaaactaaaacaccagagaattacagacagcgaacttgcccctaagccctcgttgtgggtttgtgtttgagcatttaggagaggactccagtgctcctcagcgacagacacagctgcctctgcggtgtctgaaggccctggtcgtggtgacgctagatggccgccctgggcgcctcctgtgggcgtagaggcatcaccactctgcactggcagactcagcatggagttggagcagagtctgacacgagcacttgccatcccaggcgtttcagttctgactgagaaggtagatgcacaggggaggagagggccctttcgagctccactctgcctccaccactcattccctaaccccgcagcctcagcgccctcatctgtaaaatggggagttttgcctacagggttcagcacaatgccagcctgacataggaaccccagtggattgtcagttttgccattatcccctgcatcctggaggtgacaccgcctggttaataggcaacactcccgacggcccagcacagccccagggcagcaggaggctggcctgtggccaagaatgcatggtggagggggcctggagggggactgcagctcctcctcttcctgcttcctccctgctccaccccgtgcctagggcagcacaaaagccaatcgctagcaaactccctgcctagcaaggcccagcctggggcagaaatggctgcaagtggccgaggtctctgcaaggctgtggccgcctctcccttcccggcgtggagacgagataacacggaagccaggggaggtctgaagcctgagtatgatgcggtggtgataggagcaggtaaagtggtaaagcaggccgggccagagctgaggggcgggaagacagccctgctcagagcttggtggggagggggagggggagccaagccccactgctctctcctctggcataacccagccagaagtttatacgctagcaggggctgcaatggaaagcccttccatctggcaggcaggcacctgggattccggtgctggctctgctgtgtggcctggggcaaatgcttgccttctctgggcttggatcttcccatggagaatgacaggaagactaggtgagctcaggggtttccctatatctcttgcaaagtgacctagtttccaccacattctcagcctatggtttgtaagggttggaaagagccctgggccaacagacaagtgaaatccagcaccccgccccctcagtgccctgagttctggtcaccactaccttaccactgaggccacccctcgtcacaagaaactgcagtcatttcataaaggccagttaggataaaacagaactgagtcccagagttcctactgcgtgtctgcagagggagatggaccccattgccttgcagctctgggacatttggggatctgcagtgatctgccacactttgccaacccctgggctcagagtatcacagtctactgggtgctaggggaagaggcaggcccaggaccaggtggtctttccttagtgccttcctttcacacttgcagagggccccaaatgcatgattgccaactgggtctatacagagataatgacgggaccgaaagcagacggcactcaacatgcagctttgagggcatgccttcattttcatatgtactagagcagttgcgagctggtagatactcaacactcacctctccagggaaaaatgtgtgatgtatgtgtgtgtgtacatgtatatatatgtatatatacacacatatatgtgtatatatatgtatatgtgttacgtacatatatatacacatatacacatgcttattttaaatattgaaataaaagatacactgcacacaattttacaaataaagatacaatactctcaatttaaatgcagtctacccgagtgattcttaccaaaggctttctttgatttttgccaaactcagtagccaacctatagttgcaaatgacaaatgagggtagctccaaagagaacggtgctccatattttctgtaaagagtaggatgatcgtgaaacaaatgaaacaacaaagatttatgtcccaaccttactcctttattttttaaaatttatttttattttatttatttattcatttattgagatggagtcttgctctgttgcccaggctggagtgcagcggcgcaatctcggctcactgcaacctccgcctcctgggttcaagcgattctcttgcctcagcctcccgagtagctgggactacaggcgcccaccaccacgcccggctaatttttgtatttttagtagagacggggtttcaccatgttggcgaggctgatctcaaactcctggccttgtgatccacctgcctcagcctcccaaagggctgggattacaggtgtgagccactgcgcccggcctccttctttaaatgacaggaatgatgttactcaaataagataatattgttctaatactagaatatttccttcaatttttgtgctatttattcatgctataacagctaacactgttaggtttaatctgcattattagcattttcccatcactttcttaagcctgaccacaaaaaataaattcagcccttctgtgtaatatttgctgatgacagtggtgtaaatactcccaccatagccttttctgttaccaagatgaggttgctcaatgtgatttaggagagatacccagtagcacatcattgtatagtgtgtccaccatgcagatatgtacatagaggccagtgactgccagggcatgggcaacagtcaaatgtagtaaaacaaataggaggtagtgtgttttgagtatttattacctttgtttttaatttatttaattgtaagcttatataatttagtttatatcaatggctgtttgacagccggctcacaaactccccgggctggtgggagccatctccagcacctcacttagcctcagagaagccccctgcctccttccgtgctcagccacagctcaccctgctgtctcctaatggggaaggttgactttaggtcaccagctgccttggtgacttgcctacaagtgcgagtgagtctcagtgtgtgagcttttccttgacatgatttctttagttgctaaacataccataaagcctggtttaaaggcatcttgggcctcagtgaggaacagaacggcatcttctgagacaagggttacctctgagtccctgaaggcacactggcacctggccgccaccttgaagatgaatctcatttagtcatttgactaaatgtgcctgagagtgactgagggggcttgttaaaatggagattcctggccccatacctggtgacgagcattctgagggcgggaggtgtctcccagaggtcagcacatccacccaaccaacactgcctgatgcaggcagctgcagagcccacgcccagagcagctcctcaagggcccaggcgcctgctatggggcccctgaggcaggtctggggattagcagagcccgcagctgaagtcctcttcaagggaacagaggtgtcaccagaagccaaggagggctcagccaggacttgagggtggtcactgggagggggtcttgtgctttggatccttgaccttactcatttgaggtctgccatgattgaactggacccagttgcctggaagactatgagttttccaagatcgatcatcagcaccaattaaaagacaaatagctcccatttatctcatccttgccacactgcagggtccctggcaccctctgttccccatgtgaagaaactcaaggctcagggcagctgatgactctctgaggtcatgccctggcaaatagcagaggctgggctgagcccaggactgtctgcctttagtttgctgcatgtctttgagagacagattccatctgttcatgagtcccactggcggattgtttaaactttcttatgaacattttcaaaagcccatacaaataaagagtatgtcaaccagcactttttaagatgaactgtaaccaactagcttctcacatgcttctcatatggtaagagttaattttagctcatgaaacttttggttctgtgaaacacctgctgaacagactcctgggaagggggtctgtgggagtcgacatttatacaaccttccaggtgattctgagcttatcagagctggagaggcacttgctacccaggggcttggtgtggaacgtgagatgccaaagccaaattcaggcctctcagctcaaggcaccctgaagcacagctagtcactccagcacatgttgaagctgtgcatgtttacttcatgttgaactgttcatgttttatttttggaacactggggattggcaaaaaaaaaaaaaacccatgtgaataaagccttctagggcaccactgtgccgattgtgaaccacacgtggacaaaacaagccgcgcttgatagcaactacctacatgaccagcactcccctggatgctgatgctgccatgcgagacgggacgttggcgcagcagcatgccagccacccattgcttctcctgcttgccaactcaaccgtgctgctccctcagacaccatcacttgcgcctcccaagcaatggaagccctggcgatgctctcatgagcccctcactccagcagagcccctgaccaagccaggggagcaggacttttccagccaaggcaagaaccagggttttctgactccttgaagatctggtgtttcatggagttgaactagatgctgttccaacatctgagtgcgggaaggggaggggagggtcaccaaggatcttcatggcatggggacgggcagcggggagcacattcctcaaggactgtctgtctgcccgcccgctgaccagtgatgttttccttccctgtcccgttttgttgcaggacacaacggactggtggctgtgagtacctccccacttgatcccacttcactggccctgggcgtgtggctctcagcagcctgggaaggagtgtgaagaagcaggtgggataagggccttgagagagaaggaaaaggcagcctagtcgatgctctctgctctccagtgctgactgggggctgggtcgaatgctcatctgcagccagctgtggacatcacaggctcctttcctccccttcccctaatggggaaaggtggtttccccatggcctgtgagggagtcagggagcttccagaaacaagctgacaaggtggggaagcatgtaaccaacacagcatgagagcaggtgggaaccaggggattgggcacctggggcggggtgggggcccttgactccagatcataggcagcccttgtgtctagagccctgtgttcccagccaggtccaggccaggtaccaccttggagtacatagctgctatgtggccaaagtgtgccctggagacattgaggagctcagtctagcagaagggcctgtgccctgtccccaacacaactgacttcaagatcccaaactgagctggatatcccagagctatccttagcttatgcttctgtaacctgagtccagatacctccaggaggccacagaaggcattcaaggccacaaaacaaatgtggaacatcttcttgaagcagcagcagctctagaacatcaatatagggggaaactgtggctgtgctaacggactgatgttaaaccttaatactttgcctgatgtctaagttttacttgaacattttacgtgcggcattttgtaactcaatggatcagtaatttaaaacatttattttattttattttattttaattttttttgagacggagttttgctcttgtcacccaggctggagtgcaatggcatgatctcggctcgctgcaacctctacttcccgggttcaagcaattctcctgcctcaatctcctgagtagctgggattgcaggcagccgccatcatgcctggctaacttttgtattttta

SEQ ID NO: 96779 - DNA, 104298 bp, Homo sapiens
agtccacatagatcagctcttggaaaagacagctgagcagtgaagggtcgacagtggatctggatgggcaaacacacatcactgttagtctcactatgcagataaggaaaccgaagtatagagaggtgaagttactttcccaagttgcacagcgaatgagttccagagccaggaattgaatccaggccgcctggctccagagcctctgatcttccagattgatgtcccacccatgggaaagatgggaggggaagatgcaacggaaaaagaaagtgggacattgaggtggaaggggcggaagcctgtctggccagaggtgggggcctccttcatattgtccctggctgtgacaggtgccttctactgtgagaagctgccgggtcccagcggggctgggcgaattgtggtcctcaacaccaatctgtactataccagcaatgcgctgacagcagacatggcggaccctggccagcagttccagtggctggaagatgtgctgaccgatgcatccaaagctggggacatggtaagaggccctgcttctttcttttctcatctggggttatttcctgcacaagtctcccgcttggcacaaactcacccacccacccaaagatgcccatatcccagagggtcctttatcagcccggcaccagcagagggcttcctccatcctcaccacagccctgtgtgctgggatctggagcccactgcagatgaggaccctgaggctcataaagagtggtgacggtcccaagtcacataataagtgacgaagcccagactagaagaccagactccaagtccagtgctctttccactcccaccacatgcacagctgcagccagtactgtgtgccagatctccaggggatgccctgcccttgagtgtgtccagctagtctgctggcctgacagctcctcaaggactggctcagtgtctcatttgcccaagtccttgcactgaccagcccatcccaagaggatctcacagctggtgcccatgagcatgcactatgccaacattgggcacgttgtttaggacattatgcggatgatctcaggtagcagaactatggaaaccccggctcagtagcgagtccatcattctcaaaaccccaccagctatgtgctattccagatgagaaaacagcagctcagagaggtgatacacagctggtgtctaagctgcagtctgactccaaaactcatacatttaactctgtcccctgttctaactcctgccatggtggccaagtgcccaggtgttgtcagatgagtgactcaaggaatgtaagaaacgaatgcacattaccgtgtagcatatcacacaaccacgcaagaatggtttcgttgcagtgttcaagctctccaagagaagagtagtctttgaaggattaggaaagcttcatgggggaggtgctctttgaagtgtggggaggatttacagaagtgaaaaggagaagggtactccaggtggcaggcacagaggtgggaaggtatgtggtgcattcattgcagggcacagggagaaagtgggacatggaatccgggaggccttcagggaggagatacatttgggcctgtctacctgcctttggggcaatttgcaggttttgagaagtagaaatgagggtctggagagggcatctgtgagcctcttctgggaacccctcccttgtaggtgtacattgtcggccacgtgcccccggggttctttgagaagacgcaaaacaaggcatggttccgggagggcttcaatgaaaaatacctgaaggtggtccggaagcatcatcgcgtcatagcagggcagttcttcgggcaccaccacaccgacagctttcggatgctctatgatgatgcaggtattcaacctggagggcaactgccagctccctccctccttctctccccagacccgctcagtcctgctgtctctctcctgacaggtgtccccataagcgccatgttcatcacacctggagtcaccccatggaaaaccacattacctggagtggtcaatggggccaacaatccagccatccgggtgttcgaatatgaccgagccacactgagcctgaaggtcaggagtcctgcggaggccagaggaggagggtgggaggggcttaaatgcatcaccaccttccctcactctcagcttatccaccttcccctgaccactgagcctcaggaaggttgagctccttccacccttctccagctcaggatcagaaccctggaggcacctgccaccgagtcagggcagtgcctcaccaagtcaccttttcccctggatgactgtcacagcctcatacctggtctccctgcctctggccctgccctgctatggcccatccgctacacaagagagaagaaactaatctcctatagcaccactttcatcttgtctccgtcctgctcaaaaaccttcagtggctccccagtgccttcaagataaagttgtgtctccttgacctagtactcaaggcttcccacagtctgacttcaagcccattgtccacattttccgtacacagacgaggctccagcccctaattctttgggcagtccctcacctcgtaggatgagcttgtggttgttgagatgaaaaatattattcctttatttatccaacaaaatgcattaagtgtgtgccattggccaggccctgttctaatctcagaagatatgtaaatttaaaaacaaagtcacccctctcctggacctgacatcttacaggagagggacaataaatatgtagaattaattatagtactgagagaagggctaaggagaaaatcaaaacagtgaggcgacagggtgacagctatgggaggtgtgtactgtgttagataggtgggaaggggaagtgtccacataaggtgccatttgagttctgagtgtattgagggagggagcccagtgggtatctcggggaggtggagggaacagcaagtcaaaggccccggggtgggaatgtgcgtggtaggttaggggaagagcacggaggccatgtggccacagtaagaggcacaaggggagagtgggaggggaggtccgatcttgcaggcctccatgaggactctggatttggagggttttgcgcagaagaatgaaatcctgtgacttataattttatggaatcatcatgtctgctgtgcagggaacaggctgtaggggcaggtgggggagcagtgaggccgtttggagggaaggacaaatcccagatgacaggatagtagcttgcccagggtggaggcagtgagatggtgaaaagtgccaggtcccagatgaattctggatgcaggatttgctagagtggatatgagctgtgagaaaaagggacgaatccaggaggcttccaaggctcttggcctgtgcaacggtaggctgtggctgccgattactgagataagtggcagggtgatcaggcttcggagggtcagtcagaggtcttgttttggacctgttacctttgggagggctaaatggcatcaagtgaaagtggacagggaaggggcaagttggagcttgaagaggtgaggatagagatgtgatctgggagtggagagaggacatttaaagccaacgactgcatgagctaacccaggtccttgattctagtaaaggtagattaagaagaggtctgaggggtttaaagagtggcctgttgtccacatgggcactccaagggtctgagcaaggggaatggcaggctgcaccatcaccccctaacaggccctccattctcctcagggagggagtcagccctgagcttgaatcctggctccaccactcataagctttttgatcttttgacctctgtgcctcacttgcttcatctgtaaaatgggagtaacagaacctcgcagggtttgaggaggactacatgaaataatggaatgttcctggcacagagtggccatgcatacgggcagctcctcttaccccgtctgcagtggcctgaagcaggttcataaatgtacctggaacccgctggactgatgaaccctgcagagtctagccgtgaacatgcacctgggtcctaggagtctacagttcataatctctctcatgcttagtgttgctctttttatgttgcttttatctattcattatgtaaatatttactgagcgtcttctatgtgtaccctagcatggtgggacctggggtaaacctggggtccaatcctgctaccactgaatacctgtatgaatacctgtatgaccctggccaagtgaattaacctctttaggcctcagtttcctcatttgtgaaacctaggtaataagcgcagttacctcattcgattcagaggatgtctgccaagcacaatgggtgcacagctaagtgctcaataactactagtggtcatggtcactgctctaaagaacttgggggcaaatgcaaggtgcaggatggggatggaagcagacaactgctcacagccggtctaccccaaaccctttttccaggacatggtgacctacttcatgaacctgagccaggcgaatgctcaggggacgccgcgctgggagctcgagtaccagctgaccgaggcctatggggtgccggacgccagcgcccactccatgcacacagtgctggaccgcatcgctggcgaccagagcacactgcagcgctactacgtctataactcagtcagctactctgctggggtctgcgacgaggcctgcagcatgcagcacgtgtgtgccatgcgccaggtggacattgacgcttacaccacctgtctgtatgcctctggcaccacgcccgtgccccagctcccgctgctgctgatggccctgctgggcctgtgcacgctcgtgctgtgacctgccaggctcaccttcttcctggtaacgggtaacgggggcagcgcccaggatcacccagagctgggccttccaccatttcctccgcgcctgaggagtgaactgaaataggacaaccgaatcaggaagcgaagccccaggagctgcagccatccgtgatcgcgccactgcactccagcctgggcgacaaagccagactctctccaaaaacaaaccagaaacagaaaagaaatgacgacccaagacccccctacaagcatacttcttttgcgtattatgttttactcacaaaacaaagctcatcatgcgtttgattctgtgttgtgttccttttcttttcttttgagacggagtctcgctctgtcgcccaggccggagtgcagtggcgctatctcggctctctgcaacctctgcctcccgggttcaagcgattctcctgcctcagcctcctagctgggactacaggcgcgcgccaccacgcccgactaatttgtatttttagtagagacggggtttcgccatgtttgccaggctggtctcgaactcctgacctcaggtgatccgcccgcctgggcctcccaaagtgttgggattacaggcgtgagtcaccgcgcccggcctctattcccttccgtatggaaatgaggttaactcatttgcaggaacctaacgcccgccctcccccgactcggatcgctggcgtgaacccagcggccccgtgctctccgggtatccctggatcgaggcgcacgcgttgttgcaaagtctcgcacttagggattagaatgtgcctttgcgtttcgttttgttttgcaacaatacaggtgtgagggatcgcagccctggtccaggctctagtctccccgccctctcgctttcttgggcctccgggcgcctcaaaggtaaaactaggccatttgaagcctgcgaagcgaagggcagtcggtcttcaggcctagcgggcttggctgggctgggtcggtggacccctgggctggcggcgggagcagagcatcgagcggcttttagctggggttcgggcggaggacctgggacaaccgcgggcctcgctcctccccggacggggcgggacggggaagtcccgcccaccaggcccaggccccgggccgccccgagggctgcgcccacctccttcctgcctcggcaaccccgggccctgagggcaggccccaaccgcggaggagcaggagagggcggaggccggcgggccatgccctggtcgtcccgcggcgccctccttcgggacctggtcctgggcgtgctgggcaccgccgccttcctgctcgacctgggcaccgacctgtgggccgccgtccagtatgcgctcggcggccgctacctgtgggcggcgctggtgctggcgctgctgggcctggcctccgtggcgctgcagctcttcagctggctctggctgcgcgctgaccctgccggcctgcacgggtcgcagcccccgcgccgctgcctggcgctgctgcatctcctgcagctgggttacctgtacaggtgagtgcttcgccccgggaggggaggagtgtcggagcccagcacctccgtcagctgggtcacctgtacaggtgacacgccatatgccgggaaggggactgggagagggaaccaagtcctgtgggcgcctggcctacaggtgagcgtgcagccctttacggaaagggaatcccggtagactgccttcattctagccctagctttcctggcacaggcgaagaaactgaggcccagggaagaaagggaggcgcatgggctttgaagtcggacctctcagggatccacttctggctttgccccctctcgcctcacttctgcatttctctgagcctcagtttcctcctgcgtagaaaggaggtagtcaccctgagacaggtgtgacgggcaggcctgttgtgaagagtgagcgaaagaatgagaaagtgcctcgcacagtgcctggcctgtaatggcaggggctgcggactcagttcagcatcccatgtttcagcatgggcagggccttgggaagtcactgacctctcagtggggctgtttggttgctgttcccattgggatggggatagcgcctgcccgtttggtgaagatgcagtgaaatgacatctgtccactgccctggctcagagtgagcactcagcaacctcagctggcttcttgacctgggcctccctgggagtttcagcagccctgaccccaccacagcgcttgcccctcacaaaggccgcctctcaccctgtctgcctggttgtattcttccccctgaaacttggcttcccaccccagacccagcaagagggcagagatggcctctgactcatccatgcccatggagccagccagggctgggcataggctgggtcctggaaaatgtgtgtggattctgctcctttttggacctggtggagcctcgtagagatgggaaaacaaacccaaggctcagaggcatgcgacaaagtcagggcagagggtggtgtgggttgggatggggtggccagggccaggatctgctcttgaatccgtttttacaaactcttgagatctggccttgacaaagccacacggagtctccaggagtggaagagaggagctttgaatgtggcagttttgcctgagggattatagagacatcagaaaaccccgggtgggcatgaaggggtgcagttgttaagtcctgggcaggcctccatgagccgtgaatctgtaactaccttatgcatctttgtggccaatatttctgctgagcttgagtcagacagactgtactagctttggctttggaaatgggtctctgttcctgcctgtgaattggccgaggcaggggtccctgctaggtcactggggaccataggcaaaggctcctgctgagggagaaccccagcctgtcctgcctgcctgctcctcagtgtgttcttgtgtccttccaggggaagtgacagtacatgtctggtgaatgagcttgtgatgagtgaacggggttctctcccaataggcaactgagagcaaagttctgggtggagggtccttggtgcatcctccacttactcttcatgccagtgggtaccccagacctgtctgtccaaactctggactctcttaactccgccccaatctccatccttaaccactcagggccagcctcttaaatgggatccctccttccaatctaaccctcctccagcccctcccctgtgtggccggggcaaggcagagtctgattccatctggcctgtgcccagaagtgcccaagaggcaaatgtcctcttgcccacaggaccccaggagatcttgggcacactaaagtttgagaactactgcctcaggcaactttatagcatgcctttccaattcaggtttggatccaaatcctcattccagtacttattagctgcttataattttttgtttgttttttaaaaagaggtagggtctggtcaggcttggtggctcatgcctgtaatcctagcagtctgggaggctgacgtgggtggatcacttgaggtcaggagtttgagaccagcctgctgaacatggcaaaagctcatctctacaaaaattagccaggtgtggtggcgcatgcctgtaatcccagcatcccagctactctggaggctgaggcaggagaatcgcttgaacctgggaggtggaggttgcagtgagccgagtttgtgccactgcactctagcctgggcgacaagcgacagatgtagactctgtctccaaaaaaaaagaaaaaaaaaaagagagagagaggcagggtctctgttgcctgggctggagtgcagtggcacaatcaatcatggctcacagtggccttgaactcctgggctcaagctgtcctcctgcgtcagcctcctgagtagcttggactacaggcttgtaccaccacgtccaactaattaaaaaaaattctttgtagagatggggcttgctgtgttgcccagggtggtctcaaactcctggcctccagtgatcctcttgccttggcctgtcaaaatgttgggattacaggcgcgagccactgcacccagaccttattagcttcttgatcctgtttccccatctgtaaaatgggcttttgtgagaagtaaacaggacaaggtttgtgatgagcttgggacagtgcttagccagcgggagtagaaggtgtattgatccccatttttgtttttttgttttttttgagacggagtcttgttctgtcgccaggctggagtgcagtggcacgatctcggctcactgtaacctccgccttgcagattcaagagattctcctgcctcagcctcctgagtagctgggactacaggcgcgcaccaccacacccagctaattttttgtattagtagagacgaggcttcaccatgttagccaggatggtctcaatctcctgaactcgtgatcagcccgcctcagactcccaaagtgctgggattacaggcatgagccaccacacccggcctcgatcctcattttacagatgaaacaagttcagtgaggttaggacattgccgaaggccccatagcatggatgtgaggagacaggttggagcctgtgtccactcattagatgggtgggaggctgaggaattcacaggacactaacctggccctctgggcatttgtgtgtggtgcctaggtgcgtgcaggagctgcggcaggggctgctggtgtggcagcaggaggagccctctgagtttgacttggcctacgccgacttcctcgccctggacatcagcatgctgcggctcttcgagaccttcytggagacggcaccacagctcacgctggtgctggccatcatgctgcagagtggccgggctgagtactaccagtgtgagtgaaggcctgtggctggccccsctgtcgtggcttggtggggggtctctcaaatgttggaactgtttttagtcttttataaaggctgcttagaaaacaggagaacaggctttagtcaggcagatctggcttgaaacctaaagtcactctacagctgtttgagtttggacaaatgccttgacctctctgagtatgtttgttctcatctgaaatatgggcttaaatcctcctgcctcataaggttgatgaaaggattaaatgaggtgatgcaaagaaagcccatttcctggtacataagttcctggtacagagtctcactctgtcatcgcccgtagtggagtacagcagcctgatcatggctcactgtagcctccacctcccaggctcaagtgatcctcctgtctcagcctcctgagtagctgggactacaagtgtgtatcaccatgctggctaatttttctttctttttttttttttttttgtagagacgaggtcccactttgttacccaggctggtcttgaactcctgagctcargtaacctcctacctcagcctcctaaggtgctgggattacaggtgtcgcccactgtgcctggcccacaagtcttaattgtaatttttataattttgaagataatgaagtgtgtaaggtgcctgatacagcataggtaactttttagttaagaaacaatttcatacgttgggaggccaaggtgcacaggtcgcttgaggccagagttggagaccatcctgggtaacatagtgagacctcatctcttcaaaattttaaaagagaaacaagaaacaatatattgaatgccttcatccagtcaggttttcattgtgcatctcttctgtgcctgttactgtgctggggacacagcagtgaacaagatgaacccagcccctgccctgccaggatgatagactaaaacaagtagctacggttgagtgactggaaaagggagaggcagggagcagaggatcacagggccccctaagcatgggtgaagtttacagtgaggagctttgggagggtttttgcatgaaaggaaagtgacttgcccatttccacagacctggacagtggccaagctaaagagggcccccactcacatccgactcagggtccaagccttcccctttgcctttctccaccgctgccataaatgccacagcctctcaagaaaccagtcctcactctaccgtcactcgctgtgtgacctggagagccttcctgtggaagatggaggttggactcgatctccaagggccctttcgtcttgctagtctgagtctatatattgattgaaaaaacaataatagcggctgtcacaatcgagtgccagctattagccaggccctgtgggaagcasttacagtcatcattgctcatgttcacagcagccctgtaggtttgtgctatattgatcttcatttttaaagaggtgcagaaaggtgagtgacttgccctgggttactgggcactcactgggcacacgtctttgtctgttgagggttgggggtgtctagaaccagggccaagtgcagacagtctgcactgygagtgtggcagggggtaagggggcgagacagattttccctactttttatttagcaaacatctctttcgctgctgttatgtgccaggtactgggctgctgggggatcccaagtgagcagagtctgttttctaccctcgaggagcccagagataaggaaatagataattactgtgtgatgagactccagacagaggtgggtggcatgttacagggatacctgacacagctgagtgggtggcatggggtcagggtgggtgactcccggggctcttcaagctggggcctgcggggtaatggaggagtaggccggggaagtggggcctgtgcttctggcgacctaacatcctgggcagagcttgtcaaggtcacggaaggtggcatgctgggcaaactggaagaacatcagccctgctgagacctgggcaaggctaatgagcacagatctgtttccaggctaggagtgggttctgggcgcctaataggttcccagtaaacatctgtcgaatgactgcggtggacggggacaggggaggaagcagtcgggagacgtgccggtgccacttccatccctccctggaggcccttgtgcttctgctccaggattggcaaccaggaggtgggataggacccctgttgtaaacttctggatcttggaaaatcaaggttaggggtcagtccgatggcctctggtcttggaggggaggggaggggagtggggagaccttctgtccacacagcagggacatctctcctggccctgagggcagctttagccagagcctgttgccaccccatgggattttctactccctttttgagactaagaaagacggaactgagactgttgatttttagacacaaggaaggcttgtgttcttcccagaaagaaagggttatggggccctggaagatgcccaggatgcagccaaggcccaggggtgctgagtgctgggtgggccacargtcacatcctctcatctttgacaaataccacccggatagcacctacgcagcaaagcgctgtggtgaggggcaggctctatattaggagtcatagctttgtttttggttgtgggaactcactgggtcttctctagctgcagatttgccttcaacaaacgagggattctaatacctaccccagggttgctgggagggcccccacggtacctgtgaccgctggggagtgccaagcaggctggccccaggactcactgttccctcctactctttgcaggggttggcatctgcacatccttcctgggcatctcgtgggcactgctcgactaccaccgggccttgcgcacctgcctcccctccaagccgctcctgggcctgggctcctccgtgatctacttcctgtggaacctgctgctgctgtggccccgagtcctggctgtggccctgttctcagccctcttccccagctatgtggccctgcacttcctgggcctgtggctggtactgctgctctgggtctggcttcagggcacagacttcatgccggaccccagctccgagtggctgtaccgggtgacggtggccaccatcctctatttctcctggttcaacgtggctgagggccgcacccgaggccgggccatcatccacttcgccttcctcctgagtgacagcattctcctggtggccacctgggtgactcatagctcctggctgcccagcgggattccactgcagctgtggctgcctgtgggatgcggctgcttctttctgggcctggctctgcggcttgtgtactaccactggctgcaccctagctgctgctggaagcccgaccctgaccaggtagacggggcccggagtctgctttctccagaggggtatcagctgcctcagaacaggcgcatgacccatttagcacagaagtttttccccaaggctaaggatgaggctgcttcgccagtgaagggataggtgaacggcgtcctttgaagcaggatcagacccagccagcagagatggagagtgactctgttggcagaaggcaggcgaggataagctaacgatgctgctgtggcctcyatgcactcagcaagagygggaygcctstgctgggccgggcaccagggatggtgctgagtsgggcagaggcctcctttcaaggagttcacagtgaacaagatgagaagggctgggccctggagggtcaagagccccaattaygtacaagacactttgggaggaaagaagactaccttttccccctgccaytggtatagctggtgccccaaaacttccacctccctccctggcyacctctaaaatgactggtataggkgctkccccaccccttagctcccctatcctgggctagraggccacagggrctgtcctctagaattcttccttccctcccccacaccattcattcaattcatgaaacaaatctttgccragagcagtttatgtgccaggaacatcattctgtccttgcaacctggaacaagaccagctaccagcctagcttcatccgctacttgcaccaaccagtcccrggttagatcccaaatgctagaagccagggatgcccaactctgggtggccccagtcagaacctctgggatctcagtgaagctggcctggcctctgctcctgctctcaaggggctgcttttcaaccaagagccttgtgagcctggtctgagccttgcacagccactgagtattttttttgccttagccagtgtacctcctacctcagtctatgtgagaggaagagaatgtgtgtgcctgtgggtctctacaagtgacagatgtgttgttttcaacagtattattaggttatgaataaagcctcatgaaatcctccaacctagtctgtgtcatcaaacgaaatcccctatggagttcagagcctgaactggaagagatcagggacataaaatctacctctcaaaatcagtcaaggtccacraacagagagagggctggcttaggtggggtttctcaacctcgtgtttgaagtttcaggagctggtgagccagcgtggggtagacagctcagctggagatcagaatccagatctgggctgacttagtgcatcctcttcaacaccagctctgctgctgggcccagcaggagtggccacagacacatttagggccaagaagtgaatatagttgcctggtgaagaaaggtctttttgctgggagctctgagaggttaagtgatgaggtgcctcaggggatgtggatgtggtgggtgatggtgctggggaagtggaaccttttgctgttctaggaggtccatggtttggagaaacgggacagaaaagtcaattgagatagagaagaaaatgttctagtcactgctgtgatgggatccaggatagtctcagctctgttactattctggtggagacacaaaaaccaggataagtaaaacatttagtatatcagatagtgttaagaagtgctaaaagaaaaagggaaagggatagggagagagagtaagtatttgtgtgttgggggtgggaattacaactttgtatagaatggctggggaaggccttcctgcaaaaccggtaagctggttagcagtgacttgggtgtggcctataaatgtcacgagaaggagcagaacctggagtcactggtagcttgaaccactgtggtggaaggaatgatgcaaacagaattccaccggatgaataagcacttgtaaccactctgttggcctggaactaaagatgacccagagatgaagggtgggggcagggagaggatctgagatgatgctggtgacttttacatacaagcaatggttagaggcagaaaggatcctgcagatcatcctgtctagtgattttcaggcttttgaatatcatgtacctataaaatggccaacatggttgcaacttaattttaacaaaaaagggcattaaaaactaccaccatttggctgggcatggtggcccacgcctgtaatcccagtactttgggaggccaaggcgggtggatcacctgaggtcgggagatcgcgaccagcctgaccaacatggagaaaccccatctctactaaaaatacaaaattagccaggcgtggtggcrcatgcctgtaatcccagctacttgggcggctgaggcaggagaattgcttgaacccgggaggcggaggttgcggtgagccaagatcgtgccattgcactccagcctgggcaacaaaagcaaaacyccgcctcaaacaaaacaaaacaaaacaaaacaaaaaactaccaccatttattttcatcatctcataaaaggatgtaccaatcttagaacaaagaccattcttctaattgaatacatgtaaacatacacacacacctgaaattgcaggaagagatggagatgtttatctactctgtgcttgaaatcaatgcctctaatatttgtatttataactgagtagggatatagcagctaacgcgtttgcttcaactaatgtgcacctaatgaggaaaacatttaataactagaataggcaacttcctcttttctggggaatttttggaaaaatacatcttatagtctgacatgtatggtacttggaagctagaacccaattctgatttccttcattggactaaaaggcagaaaggctttgtgactgttttccagaccagagggatacagccagacccaaatcagagaaatgaaatgagaaaaagtagttgatgtgacaggaaatcagggcaaatcaaatgaggtttggtatcagtttgtcagttttatcgcttttgtggtttaagtgcagtgcagcaaggtactgatttctctccttaataaatttcagcatatttggaagtgaatgaaatcttttctcactccagttctaaactttaaaagcaatatattttagaaacaatacattctcccatacaaattattttaaaatattttcccatgtatatttataccaaatggtttgttcttacttttttggtgaaatgacccagttactgaaagggtgacatctttctaatgaactcttagaatttttatgaagccataattaggaccccacacagctgggcaactgtgctgatcctattcagaaaagacacaggagcaaactatagaaaataaaaactttatttttttcaagtttataagatagttcccattacatataacattacggtcacggattctacagccacaaatgcccgcagtcacataaatatatccaatccaatcaatgccttttcctgctaacagaggcatctgaagttcagagggagagtcgcattttgagtagaagtcgtccttaatgggagggctcctgtcagtgcattaggaactagccaaggagccttgcttgccagagctgtctgactcagaggagaggaagggacagatggcctgctgactggggctgaggcagaactagattttctctcttgtggtttaagatattttagaatctcggaattcagatcctatagtgtgaatatctggggagttctaacttctggatgaaaaaggaaaccaatttagtggtaagaaatagaagcctgcttaagagggaccctaactgcctccttgaggagtaaggagtcagaggaagaccctaagctcaccattccttggcccagaccattgctctaccccatactcctctcccctgtggttcagtgacactgacaaccattcaaggtagtaaacatctagaagctccacatgctgcagctagagtttgcaagtcagattctatttggaattttaaagctgagtttgtgtaaactgcgaacaagctgtggcatcagtctcttgggacaactcactagctttacagaagacaggaacgccgcaaatcaaacaaaagcccagatgggcatctaaatctggagcaggtgtccattcttctggacactaccagctgccccaggggcactggacagggtgatgctaaggcacagtcagttttacattcgaaagtcaagccacctcctcaacccaagacacacctcactccagatctactactagagagagccctcaccgtgacattacagacccatcctgtagaacccacagtgcctggccaggcatggtggctcatgcctgtaatcccagcactttgggaggccaaggtgagcagatcacctgaggtcaggagtttgagaacagcctggtcaacatggtgaaaccccatctctactaaaaatacaaaaattagccaggcgtggtggtgggcgcctgtaatctcagctaatcaggaggctgaggtaggagaatcgcttgaacctgggaggcggaggttgcagtgagccgagatcatgccactgtactccagcctgggtgacagagcgagactccatctcaacaacaacaaaaaaaaaaaaaaaaaaaaaaaaaagagaacccaccatgcccagctagggaaggactcatcatttggctaatttcatgaggactctaatgaagagggtctcccccttgatgaatggacccacagtgtcctttggtcctcagcttctaacagctcttaatcctacccacttattttcctttccagatttttgtgttggggtggagaaaaaggcagggtaattacagagagcactgtgttccctggacaattcattttggcaaacagccaagaagctcctgttttctctcttccatttaaatgagggtggcaacaaccaggaatgagcaaagactgctctgctcagcctccttacctctcttggccaagttcaagttccttttggaaagagctaagctaggaagtcagagtaagaggaaaaaggccaatgataaaagtgagttcaagttacattctaaaataaagagctcccaaaagggtggagagggaagtatctgtgtgtgtgtgcttgcgtgcatggtgggggtaccactccgcagcctcacaaacctgaagcgcagcacaacagccgtggcctttgtccaggacaaaaacccaacagctatactgcatagggggagggtttgaggcctcagagtaaaacctagagcttcctaagatcaaccatcaaacaaggcagagcagcatctaggcaactatgctgaatacagaccaagggaaggcctacctcacactacatctccctcctcccaaccccacaggaaacaaggccaaagaggcagctaagtaaaggagcactgacttcagctactcagcaaaaacttactccttaaaatcaygagttatgagcgcttttcaatgagttctgaaggaatgtgtataccagcctctctctcttgctatctgggtggcctggcattggaaggagtcttgcctctttgtgctgcaacatctctggaaatgggtatgcagaatctctggtgacaagcaattatagctggggttggtcaacaatgcctccttctgcggaccaatcctgcatctcaatctgaggtgcttgtatcatctctctctgtgtagcctgggagaggctgaacttcctcagctctagggaattttatcctgcctgagtagatgcccaaattgctcttggagggatggggcatccaacaatcatggctgggctggaaggctgtgactagtgcctgggcacccaccaatctgcccagaggtygagagatgctcctgcatttggcccaggattaagttttgggccatgaagtagggaatgatgcagtactctcatttaaatcaggaaagtctggctgggtgcagtggctcatgcctacaatcccaacactttgagaggccgaggtgggaggatcgcttgaggccaggtgttcaagaccagccttggcaacaatgtgaaaacctgtctgtttctcccttccccccacaatcagcaaagtctttctggtttcctactttagaatgggatttgagaagcagggttttccatgggaaaatttaaatacagcaatctgctcttcagtttcaggcagagatctgggtaaatacatacctgggacatccttcatatggcttagggcttccacaaaggaagtcaaatacattggcagttttggccaaaatgtagttataagcatgtttttagatttgatttgaattcttgggtctaatacccggggactggccagagctgcctggaggtggacatgaggtgcagagggcaggaaaggggtaagaacctagcattatgatgaccaagaaggaagaagctgcagggacgagcatctgatgggaaatgggtgcttctctgcagggggaataggtagaacctttcggtctcaagagccaagaagctgaaattcataagacactttagttccttctctccagtttggaagctaagcctcctgtgatacagtctgaatgacagtcaagcwgaaggagtttttagggttgtgccatttgactaaagggaaaagggactggaaagaagactaaggcttctagatgggaaatgccaaagtttaagttactcagtgtccagtgccccacagttcaccagctaggagatagaagaacaggaaaggtatcatcctagagagcagaccactggagcagctatagaggtgctactgccacagggaggtattttagatatttcaattactattttcaagactttaaacaccccttcttgctagaaaaagaaagtgggggaaacctgcgtcaaagatcagacccttacctataaaaataacatacacattcgctggaaataagtgagattctaagctaaggagactctaagactgcaagagatgttatcataaaagtctgctgcatttatctgatcaccacaagttatcagtaattctcaatctggtcatggactaagagtgcaactctgccccaggaatttccttttctttttcattttttgaaaacaaaaaaacaaaaacaaaacacagaaaaattaaaagcactgtagctgcagtgagtccattgttctctctatccaactgtccctgcttctgtatggagatgaacacggggctgcagctcactcttagcaaaaattgcagctgttggttctgattgtgttctcgccagcattccatggataaagacagagagagagagagagagagaggcagagagggagggagagaggaagggagggagggagagagggagagagagaaagagagaaagagagagagatagagacagagacacagagagagacagacagagaaagttctcagttggttccagtctccagctcccttcaggagtgaaaaggagctcaaggggaaggctcctcattccagttcttagagaaaatcaagctctaaagcctggtgaagggatactaggtctccatggtttgtgatcctccagaaaggcatgttgtgctggaagagagtgggaatagctggttaatccaacttcttctgagagcttatataaatatttgcccatactctttcctcaacacacctctccccaaggtacatggtaaccctatctatccctgcctcatagggctgttataatgatcaaataatcatatgyataaggaccttgtacattgcacactttagaaatgtgagaaattttaaataggtttcagtggtactttgtgcttttgagagattacctgttctagctattattttgaagacagggtcttgctgtgtcacccaggctggagtgcagtggtgtgattatagcttactgtggccttgaacccctggtctcaggtaatcctcttactccagcatcctgagtagctggaactacaggcattccagttatcatacagggtcttaaggatcaaataaaatggcccaggtgaaaaattagtatttgatataagattatactgtctcatggatggtcaatttcttgtaagtttcagaactgcaacacctaaatcttatctatgtccaagatggagaatgtacagatctgggaaataataatcccattatattatgtagtcaaaatcatgtccagaaaactgtgtgctgttctggaggccatattttactttttattttattttgagacaggctctcattctgtcacccaggctggagtgtagtggtatgaacatggctcactgcagccttgacctcctgagctcaagtgatcctcccacctcagcctcccaagtagctgggactaaaggcatgtgacactatgcctggctaattctttattttttgtagagatgaagcctcactatattgtccaggttggtcttgaactcctgggctcaagcaatcctcccaccttggcctcccaaagtgctagggattacaggcatgagccactgtgcctggaggccatattttttttttttttttgagacagagtctcactctgtcgcccaggctggagtgcagtggcacgatctcagctcactgcaagctccgcctcccgggttcacgccattctcctgcctcagcctcccgagtagctgggactacaggtgcctgccatcacacccggctaattttttacatttttagtagagatggggtttcaccgtgttagccaggatggtcttgatctcctgacctcatgatcgcccgtcttggcctcccaaagtgttgggattacaggcgtgagccaccgtgcccggccgatatttttaaattaaattaaattaattttttatattttttgagacagagtctcactcttttgcccaggctggggtgcagtggtgctatctcagctcactgcaacctccactcccaggtttaggtgattctcatgtggaggccatattttaaaggagggctttgataaatccaagtattggaaaccatgttctatgaagctgaggagattaactttcctatcatctagttgaaactggttccaagttactcagaatattgaggtcctagaacacagttattttggcatataccctagttgtttttcaagacagctgctcacacataatatttaaaaggctattaacatacagaagaggaaaccgacttgttatgttcaagaatgccagactagaggccaggtgcagtggctcatgcctgcaatcccagcactttgggagtctgaggtgggtggatcacctgaagtcaggagtttgagaccagcctggccaaaatggcaaaaccctgtctctactaaaagtacaaaaattagctgggagtggtggtgtgcacctgtagtcccagctacttgggaggctgaggtacgagaatcgcttgaacccaggaggcggaggctgcagtgagccaagatcatgccactgcactccagcctgggcgatggagtgagactccatctcaaaaacaaaacaaaacaaaaaaaagaatgccagactagtatgtgaaggtagagaaatttttgctcagtggaagggggaacaccctaacagcttggttgatcccacggtggaataggctactgggaaccagtgtcctcatccttgggcatattcaagcaaggactagagagacttctgtcagaaaggctgcagaaaatatccttcacagagtataggttgaactggataaagtgctaaggcattttccaattggtatatactttgtttgttttttttgagacagggtcttgttctgttgcccaggctggagtgcagtggcacgatctcggctcactgcaacctccgccttcagggttcaagcaattcttgtgcctcagcctcccgagtagctgggattacaggagtgcaccaccatgcccggctaatttttatatttttagtagagacgggatttcaccatgttggccaggctagtctcgaactcctgacctcaggtgatttgcctgcctcagcctccccaagtgctaggattataggcatgagccaccgtgcccagcctcaatggatgtattctgttgtagatgattaaagacattagctcagagttaccaactctgctgatgagttgttctctcccccatacccttcttcagaccaggaaacattgatgcctacacccactagtgtctttcccaaagagggcaacaagaagcactttagaatcaaagcttcataacatatgtgaaaaaataaggatccctgaattgctacataaagtgacaaatgaaaacatgagataataatgccaactgattaccaatctcatagtttattatagttgctaaggtttccacttaactggatgaagagtatcagggcagttggttctagctggcaacccaatgcctccatgtctaagaaatagagttgctggaagaaaataaattgggatagggagggaaagaacttctacagatccatttagcagatgaggatactcaaagaggataattgttcaaattcacatagctgagacacagatgggattttaagttctatagccaagactctttcatctattgtttcctatattaagaaggggtgacctgggccaggcgtggtggctcaaacctgtaatcccagcactttgggaggccgaggcaggcggatcacaaggtcaggagttcgagaccagcctggccaatacgggaaaccccgtctctactaaaaatacaaaaattagttgggcatggtggcgggtgcctgtagtcccagccacttgggaggctgaggaaggaaaattgcttgaacccaggaggcggaggttgcagtgagccaagactgtgccactgcattccagcctgggagatagagtgagactctatctcaaaaacagaaaaaaaaaaaaaaaagaaaaaaagaaggggtgacctgaagttgggacctgtatagtggtggggttaacatcagaacaatctttccagggctcaaaggcaggaaagactttctctacagaaacagctattggttgtactgtctgagaacttgaagcatggaaaagaaagaatgattagcctttttgcagtcaagtctgatgcttgagaaggcactgtctttgaagatggaagatggggcacatctcaggtttaatgatgggatccctgtagaagggcttaaagattttaagattcttgagtgacagggaggaagaggaagggatggatctaaaaacttaagaggaaaaactccatctggagaaaaaaaagaccctctttttctttaaagaaaaatgggagaggaagaaagagaaaatattataaatgcataatagattgctaagattttgtagtttttcccatttttctcattactcgatgtacaaccacatagactatttttctttaccatggttacctgtttggctgcaatttcttcatctcgtccatctccaatcactacatatgtgactttctttccaaaccttgacacaattctctcaaagcagctctccttacctgatgagaaaaagaaatttcctgttagaatactcttctcttcttttcaaaaccaaagaagagggctgctgctaggttcacctgcctgtgcttaggtggactaagtgacagcccatgtagtttgcttgctggggagtagggatgggagctagagatccagtagaccctctgcccaaagaatgtgaagttgtgccattaaaataacttggccgggcatggtggctcaagcctgtaatcccagcactttgggagaccgaggcgggcgaatcacctgaggtcgggaatttgagaccagcctgaccaacatggagaaaccccgtctctactaaaaaacaaaattagctgggcatggcggcgcgtgcctgtaatcccagctactggggaggctgaggcaggagaatcgcttgaacccgggaggcggaggttgcagtgagccgagatcatgccatcgcactccagcctgggcaacaagagcgaactctgtctcaaaacaaacaaacaaacaacccaaaaacttattttaaccttcacgttgagggtgaagtccctaagatcttagtgtgagggaatttctataaatgggaaagattaataggtttagtgacttgcccctagatcacaaacaagcaagtagctagaacttggggcccctgactccaaatctaggctctggtcattgtgtcataatgaatgaatgatttttggggtgaaatgttttagggtagaaaagagaagtgaaaacacaaggccctgatttcttgttagaaacaataacaaacaaaaagccatttccctccaattcttcatttcccagaaacagtcctgggtataggccttacgtctttcagtgagagaacagccccagaatagaactgagaacagtgaccaataaatatggcagcaacatttgtcatatctggaacctccttacttactataccttgtagttgtaaccaagatactgcatcactgaaattgaccttgggaaatgggtgatttaaatccatttctcagaactgcagacagttttgagaaacatggcagtgtatcaaaactcaaatcccatctgcaaccaacacctaaaacatacacagatcatactgctgtgggaaagatactttatttgtataaataaaaagaagttatatcccttgctctttttatctccctgcttctgccaccttcttcagttaaacaaggtcctaactttggctttcttcttcatcctgctctattaaccttcttgttctttccccttgcccaayagagtgacttagcaccagggttcctgtgtaaataagataaagctgcctcttcctcaagacatttgactgccatctgctggaaaatcactgtaatatataaatatacaaatctaagataactgtaacataattggccagaacttatacttccatacgcagaagtcctacttggcacagaagttgtgcagatatgtaactgcaaatctttgacatccttaacccagtggcacttcaaaacagacggactagtcaactggaccagacactagatcactctgggctcagctggccacttacaatacaaggcttggcttaggtgcacttgggtctcttttagtgctaatattttacaatagaattgtcatgccttacattcatatgagggattcaatcaatgtttgctgagtaaattcatattaatctcacaaatgattcagtggaggactgtagtccaggtcttatgcctcaattcagttcaaacattaaaccattcaactaataataaattcttattatgttcatggtgttgaagagttctttaattccatttcacccattacagctttacaaactaagccaacctccaccagatgcacagtctactatgatctgtctgtagcaaaaaacttttttaagtgagtcagtttgactttcttgtaagactcaacaaaggcagtaactcatattttgaggataagaacacagacattttcactgtcctggcatgcaatgatcaaggatgaaatatactctgtaatgtctcctttaaaaggattaagaggccaagagagttattaacagctcaaagtaaagaagcagctccatgaaaacaggactcactccaatacagttggtaaaatacttccatttctggatatgagctttcctgttcaggaggatgaggccaatgattaatcagtttaccatatgtcaagcaattgaagctggtgaactgtaagatcagccaaatctttggagaatattagtccctgggttttctctattaaaatatttctagccaggagcggtggctcaagtctgcaatcccagcactttgggaggcctaaggcaggaggattacttgagcacaagagtttgagattagcttgggcaacacagtgggaccttttccctacaaaaaattaaaaaattagctgggtatggtggtggaacacgcctgaagtcctggctactcaggaggctgatgtgggtggatcgcttgagcgtgggaaggttaaggttgcaatgggctatgatcgtgccactgcactccagcctaggtaccagagtgagaccctgtctcaagaaaaccccccaaaacaaaaaaaacttctgacattttcagaaattattttgagaattctctttaatgtccccaaatcacagaatggccattaagagaaccatattttgctatcatttcagaggaagtgaaaaagtatttcttctccttgctcccatttcacagttctgtgaagaaaagcctcaagcctcctactgtggttaccatagcaccagatcccactgcagctttgcaaattagctctggatgaactgagactgaggaaaaataccaaataagcacacttactgacagagggaatgagatcatttccattagcctgatgagcctgcgggtgccaggtctcagtataataagcactacagaaaatctgtctttcagatgtgggaggctcagtgagtgctctgggttcctatgatatacataaagcaaccggcagcaggaacaatatctgaagggagcgctttcatatatgttcccttccacccaatcccttgtaaatgaaataattcaaccatacaaaaaagcatggagaattaccagccttgacaacaaagtgagaccccatttctacaaaaaataggaaaagttaggcatggcggtgtgcatctataatcccaagctactcgaaaagctgaggtgggagggttgcttgagccagggaggtcgaggctgtagtgagtcgtgatcactgaactctagcctggtgagaccctgtctcaaaaaaaaaaaaaaaagaaaaaaatgcctaccaccaacgaagctttgtaaaatcttaacacttcacagttgctgtatttatttacttatttatgagacaaagtcttgctatgccatccaggctgaagtacagtggcacaatcatagctcactgcagcctcaaacttgtgggctgaagtgctcctcccaccttagcctccagagtacctaggattgtaggtacaagccatcacacctggctaatttttttttttttttttttgagacagagtctttctctgttgcccagactggagtgcagtggcgtgatcttggctcactgcaacctccgcctcccaggcgcaagcaattctcgtgcctcagcctccyaagtagccaggactacaggtgcccgccaccatgcccagctaattttagtagagactgggtttcaccgtgatgcccagggtggtcttgaactcctgagctcaggcaatccacctgcctcggcctcccaaagtgctaggattacaggcatgagccacggctcctggccacacctggctaattaaaaaaattttttttgtagagatggggtctgactatgttgtccaggctgatctcaaactcctggtctcaagtgattctcccacctcagccacccaaagccctgggatgacaggcgtgagccactccacctgacccttatagttgctctagattaaaaaaaaaaaaaaatcaagacattacagaacaaaacttttcaagtactcctaaaatgtaaatattttaaatctttatatagatattacatactgtacatttatctgtctgcaatgttttttgttcatcagtttttctttttttttgagacagagtcttgctctgttgtccaggctggagtgcagtggtgcaatcttggctcactataatctccgcctcctgggttcaagctattctcaggcccccgaggagctgggattacaggcgcacaccaccatgcccagctaatttttgtattttttgcagagatggggtttcaccatgttggccaggcaggtgatccacccaccctggcctcccaaagtgctgggattacaggcgtgagccaccgcgcttggcctattgtttttaatattaatccttatgagtatatgtaattttacttaatccacttttaactgcaatatagcattctgttgtttgaatatatctatcaattttctgttcatggacaggtttacagaccaattattttctatgataagcaagtgtgcatcaaaaaaatccttgtacatgtctccttgtacatgtaagaattactcaaaggtagaggttagcaaactttttctgtaaagagtcagagagtatatagtatatattttaggctttgcaggccctatggtccctgttgcaactattcagctctgctactgtagtgtgaaagcagctatataaataagtgggcayggtttcaataaaaacttacacaaacagccagagggtaggatttagcccatggactgtaatttgcagacccctgctctaaagtatatatatatcttaaaagtggaattgcatgatcatagggttatgtacacctcaaacttcattagacattaacgttctccaaagcaggttatatccattttcaatcccacttgcagaggcagagttcccattacattgttagatttaagtttttgtctatctgatggttggagaatgtaccacatttaaatttgcattttcttgatttgcagttccttaatttgtgaggttaaggacttattcatatatttactgacagttttgttttcctcttcggcaaactggttgtttcaaggtttttgcctatttttctatattcaaaattgtctcttgcttactgatttgcaggaattctttatagattctgcattctttttcttttgagatggagtttcgctcgttgcccaggctggagtgcaatggcgcaatcttggcttactgcaacctctgcctcccccactcaagcgattctcctgcctcagtctccccagtagctaggattacaggcgtgtgccaccacgcccagctaattttgtatttttagtagagacagggtttcaccatgttggtcaggctgctctcaaactcctgacctcaggtgatccacccacctcggcctcccaaagtgctgggattacaggcatgagccattaagcctggcagttcttcatagattctgtattctaactgccaattaaatgtgttgtaaataccttatcccaaaatgtgggcttgtcttgttaccttttttcaagagacaaggtctccttctgttgcccaggctaaagtgcagtgcagtggcacagtcacagctcactgcagcctccttgaactcttgggctcaagtgatcctcccgccttagcctcttgagtagctgggattacaggcactcaccaccacacccggctaatttttatttttatttttgtagagatggggcctcactatgttacccacgatggtcctgaactcctggcctcaagtgatgccttggcctcccaaagtgctggaattaaaggcatgtgcccagcttgtcactttgttatatttaactgtatgtaaaattaaaagttccatgcaatcaatgattttttttttttgctttttatactatcttttgattcttaaaagaggcccatcctcaccttaagatcacacagatactcttctatattttctcctaaaaattaaaaaacttaccttttgcggtaagtttttaatctacctgtaatttatttttgcatataacataaagaaggaaaacaattctgccttttttcctatatggataatccagttatcttagcaccactgatcgaaggtaagttccatgaggacagaggacttttgtcactgctgtattcctagtgccttggcgttgcctakcacacaataagcaccgttattatttttcctcatytagtggatcgtttccatctgcatataaaatagatataatttctcttatgaatcttataaatcctctgaagtccatataactctagagccactacttcatttttctgttcctctccaaacaaacctcctctaaagagttgtatagttcccttctccaactctccttccattctctctcatttactaataagttagtaaaaatattagaacaggcctaataaaaatattgttagaccagttctataaaatttcaattctctcttaaactacttccaattagggtttaatcccgatcactcccctattcaaactgcatgtcaaagctattaatgatcttcatgtatctaaaaacaatcttcaattcaattctcaagtctttttttgagacagggtctcactgtgttgcccagactggagtacagtggcataatcacggctcactgcagttttgaccacctgggctcaagcgattgtcccacctcagcctcccaagtagccgggactacagacatgcaccaccactcccagctaattaaaaaacaaaaaaaacaaaaacaaaaacaactatgtagcccaggctggtcttgaacccccgggctcaagcaatccttctgcctcagcctctcaaagtgctgggattacaggtgtgaaccactgtacctggcccttgggtctcatttgacccatcaacaacattagaaggagttgatcactcttccttcattctttcaagacaccattcttctcattctcctcctgcctcacaggtcaatcttcctgacacattttgctggttcttcctcatgatccaaacattagaggaccccagggcgtagttcttagacctctattcttctctatctctactcacttctttttttgttgttgaggtggagtctcgctctgtcacccaggctggagtgcagtggcgccatctcggcttaccgcaacctccacctcccaggttcaagcgatgctcctgcctcagcctcccgagtaactgtgattacaggcgcctgccaccaagcccagctagtttttgtatttttagtagagagggggtttcatcatgttgactaggctggtcttgaactcctggccacaagtaatcagcccgtcttggcctcccaaagtgctgagattacaggtgtgagccactacacttggcctgtactcacttctaagatctcattttacttgagaaaactgaggctcaggaaagaagataatctgcctaaggtgagagctagtagtagggaggccaggacttaaatccttgtccttgatgtttattttctttttcctttaaaaaaaaaagctggtaaaatatgcataacatgaaattcactaatctttaaaacaaaaaattttggcgaggtgcggtggctcatgcctgtaatcccagcactttgggaagctgaggcagatggatcacctgaggtcaggagttcaagaccaacctgaccaacatagtgaaaccccgtctctactaaaaatataaaattagctgggcatggtggtgcatgcctgtaatctcagctacttgggacgctgaggcaagagaatcgcttgaacctgggaggcagaagttgcggtaagccaagatcgcaccattgcactccagcctgagcaacaagagcgaaactccaactcaaaaaaaagtagcataaaatttactctcttaacatttttttttttttttttgaggcagagtctcactctgttgcccaggctggagtgcagtagcgcgatctcggctcactgcaactccacctcccaggctcaagcaattctcctgcctcagcctcccaagtaggtgggattacaggctcacgccaccatgcccgactaattttgtatttttagtagagacagagtttcaccattgtggccaggctggtcttgaactcctgacctcaagtgatccacctgccttggcctcccaaagtgctgggattacaggcgtgagccactgtgcctggcttctcttaacaattattattatttcgagatggagtctcactctgtcacccaggctggagtgcagtggtgcaatctcggctcactgcaacctccgcctctcaggttcaagggattctcctgcctcagcctcctgagtagctaggactgcaggcgagtgccaccacgcccagctaattttttgtatttttagtagagatggggtttcaccgtgtgagccaggatagtctcgatctcctgaccttgtgatccacccacctgagcctcccaaagtgctgggattacaggtgtgagccactgtacccggcctcttaacaatttttaagtgtaaagttctgtcatgttaactattatttaacagatgtctggaaccttttcattttgcatgaccgcaactctatacccgttgaacaattcccatttcccttcccctccagcctctggcaattatcattctactttcagttctatgcatgtgattactttagaagcctcatataaatggaatcataaagtatttgtctttttgtgattgtcttattttcactttcatttagcatgtcttcaaggttcagccatgatgtagcctgtgacagaatttccttcctttttaaggccaaataatatttcactgtacgtgtataccacattttgtttatccattcatccacatttgacatttgagctgcttctaagctctgaactattgtcaataatgctgctataaacatgagtgtgcaggtatctctttgagaccctgcttttggatatttggatatatttcaagaacctgagacccaattctctcagatatttacgcagaagattacccaggctgaactcaaactcctgggctcaagtgatcctcctgactcagcctcccaaatacctgggactacaggtatgcaccaccgtgtctatcaacagttgcatcattttataatcttaccaacagtgcacaaaggttccaatttctccacatccttgtcaataccttttatttatttatttagagacggagtctcgctctgtcacccaggctggagtgcagtggcgcgatctcagcttactgcaagctccgcctcccaggttcatgccattctcctgcctcagcctcccaagtagctgggactacaggcgcctgccatcatacccagctaattttttggtcaatacctgttattttatttaagacatagggtctcattctgtcacctagrttatagcacagtggcaagatcacatagctcactgcagcattgaacttctggctcaagtgaccctcccaccttaaccttccaagtagttaggactacagctgcgtgccaccacacccagctaattaaaaaaacttttttgtagagacggaggtctgccatgtggctcaggctggtgttgaactcctggcctcaagtgatcctcccgtctcagcctcccaaagtggtggtaatacaggtatgattcatcttgtctggccaccatttttaggtatatagtttagaagcttgatttttaacctagtgctttttctattatactacatactctctgtgaaaaagagaaacttgaaatgaggcaaaactagatttctaagctagatattatgttctttcaaatattatcaaagagcatgcttatgtaacttactagctgtgagaacctgagcaagctatataactactaagcctcaattgcattactgaaaatattagaagactgttgtgaggactgtaggtattacaaataaagtgtctaacaagaggggctagaaaataataggtgcatcatgagtagaaagttttattgcaaggccagtgacaagaaacagcatagaaaccataccaattttggtagcactatagatgttctcaataggaaatatttctcctagtccatataggagaaccttggccagggctggaaccagctgggtggtagtgatcagaacattcacacaattctttctataagggagtaaaagggaaaagaaaaggtgaaactaaaccaacctgggagcaagaattcgtatgtgccaactctttagaatttaattattaaaaattaactttaaaggacctggtattatactgttcagagccaatgttcagctactactcattatttcatgttcatttactttctatattaaagggcagagattctactcatttttgttatcttagtggacacacagcaacaacttagttcttgccttctttcccctctgaccattctagtcacaagtacttgataaataccaccaacccatgtcactgatagcatattttagaaaacaaacaacaaaaagctctgagctgtactctttcatctgaatgcaagtcagtccataaatgagatatgatttgtgttcgctttgctcttcacacaatagcaacatagattctagaatacacattaattttatatgtcctttaccttcaccagatatccactccttggtgtcagctttactgtttactacgttgtggatctggaattactgctttgcgggagggagtaatagggtattggtgcagacacagactggtgcatttatttcccagtctaagcttcacgttgaaatctccttaatctgcttaatgtaccctttttcttttgaatcttgccttctttwgtgggtttggatacatttcttggagcttcctgtacctaggacattgtaataacatctcctccatgtattctttgacgtcaccaggtccaacttatggacaagagattatgggttactgagttttaatttcgtgagcaaaaagtaaggagaaagaaaaaggatttcatatataaatattctcttaaaactagaagttgtgctgttaacataaaatgaccttgcttctcacctaacacaaatacttccctacatcatttaaactcctctctacccctatcccaaaccctattttagagaatggcttatcctgaactggagtagaagaatatgtcgctgagaggatgagacctaaaagaaccatttccatacctggactggatgagaagtaaggactttaatgcagttcctaaccaggaatctgttaaaacttcaatttctgctcttaatctctgcagtgcttccttcctctggggactgaggagacctttaggaataaaagcagacacatttatcatttgacaacatatatttgctgacagtgagaaagcaacttctaaattcaatttaaaaagtgtgagtcactgaaatattctactgagtatgtttatatatatatatatacatatacgtatttttttcccatgaacacatgtgctttattgaattccattgtagacaggtgaatataaactgctgtatataggggtggggtcaaaagggcaggaccaacagccccagggtgcagggtcagcagtggagtacatgggctctactactggccttggagatcctttatcttctgagaaattgcttggaagattatcactgagctagtggtgaaaagcatgatgagtgcaatgaccacagggatgtcgaggaacagggtacagatgttcaagcacttggtggtggaggcacaggcctgygccccggtcacatcacccaccatcttcctgtccctagacttcatgcagtacactaatgctatgaagcccaggaagcactagtttatgaagagcattttgaacagggtttgggcatggaggtctcactgcagatgtggatcacagaggacatcaagggagcagagctatggggtgcccctagcatggcaacctcgtgtttctccttgaacatctcctaatttgtcgggaggccagtgttggcgtgagtgaacaaggatttggaagtgtggttcttggtgtcaagataagaccagttgtcctttttttttttttttttctgagatggagtcttgctctgtcgcccaggctgtagtgtagtggtgcaatctcagcttactgcaacctccgcctcccaggttcaagcaattctctgcttcagcctcctgagtagctgggattataggcagctgccaccacacccagctaatttttgtatttttagtagagatggggtttcatcatattggccaggctggtcttgaactcctgatctcatgatccacccaccttggcctcccaaactgctgggattacaggtgtgagccaccgtgcctggcattttttttttttttaatttctcttcttggagaaaccttagagtagtgctacccagaatgccatttttactttctttatcacagtgttttggggatgttcaggcaaagataaatttttagaaaaatcttgttacggggacacaataacaacaataaaatcagctgacagaaataatttagattctggtgcaagctccttctttcatcaccaaccaatagcatatcttttgcagactggttgaccacactttgaattgcactgcttagaacatgacatcaagaaccaaagtgcgaaaaattagtgttacagctagaagagtccttagcatttctaatctctctgtaaagaaacgaaacccaatgaaaaaaagggccctaagattacacagtaagtttgcagcttttggtcttaagaagtctttccactactccacagaacttccatggtgactacttgtccacttgcttcagaacatgttgacatgaaattccaggttgaatgactaattctccatactgtacttctgaaacaactccaactgataagacactaaaacactacccaagactagatatctaagcacaaaagagagctcatatgatgggagcctgctctcagacacttcagttaaaatattcaagcagtaaatctggatctgaattttctacagtgaaggttaaaaaaaaatcctgtattctattagtaatactccataaaagcagatggcatttttgtgaggaggagaactggagtataatttgttttcagattgatggttccacaatgtaagcctagaattagatgactcttaacattttggataaaacaaaacgacaacaaaaccagtacctatatatgatatactcaactaatacatgatgtggcgctttcatcaattcatattgtacaaaacatacagctggccattaattttaatctattctccaaagtaggctcagaggattctcacacagggttacatcgctttgttcaggaaaccaggtccaggcattgggcagggaaaagataaagagactcaggctgtatatgaaaactaacaaaagaaaggctaatgtttgtgagaaagaaaatgcaaaaagatgtggagttaccaaaataaaaaatactggctttgaatcatgagaagaaataagcaacaaaaaggggaatctgaaaaaagtaaattagattcctgaagtctggaagcccatgatttttatctggtattagagagctgtaactgaaatgaaccaaattgatctgtaaagtcttgttcctactttctgcgccatattgtaaggcagcatagtatagtacaagggctcttgaccttgagtaaaatacctctaggccagcagtcctcaaccttttcagcaccagggaccagtttcgtagaggacaatttttccatggacctgggtggggggcgagaggtttcgrgatgaaattgttccacctcagatcatcaggcattagttagattttcataaggaacatgcaactagatcccttgcatgtgcagttcacaatagggtttgtactcctatgagaatctaatgccgccactgatctgacaggaagtggagctcaggcagtaatactcacttgccggcctgctcacttcctgctatgtggctgtgctgcctggttgctaacaggccgctgactggtatcagtctgaggcccgggaattggggacccctgctctaggcaggctatgtaatccctgaatctttgagcaacattttgtatgtatttgtatctttgatggtgatggtttacagttttaaatattttctcaaaagagtacctcactataaaaggagctgcatgaaagtgcactggaccaaaaagttagggaatgtgaatttcaaacatggtatggttacaaatttgcaatgtgaccatgaataagctgcccccactacccctatgatggacatcacttttctcaactgtaaaatgaggaattcagattagacttctgtctcttttaattcaaacaatctatgattaattaattctaaataatagaattttaggcttagtggcatctggcatttgaaatatttctggtcagaaagaatttccaagattctttaaatcacaacacattgatactrccaacctacaatcctggacctagatttctgtccacgaaaagttactagctagttctacttaacttgtcctgatagttatataaaccagccaaaaaaaaaaatgtggcaccctattaactagcgttgacagcagttgtgatacatgtcatcaaacataatctacagaacatgtttcctttaaaaaggcatttgtccaaagacaacaagagaactttccaaaattatgcttagagaagcccgttagaaatatagagcttcctcccaaaaggtttcaaccaaacctctatttttttaaatacagagtttaacatataactgtggcataatttataagcagttgtcatggggaatctaaggaatccctggaaagaaaaggaggaaaccaggaagaaacagagaatcagactggttatatgccacacttaccacccacgttgcttttatgcttatcatagatttctctcactttccggtagcggaaagctagtttcctcatccagtccacacctccctgaacacccacagatgaaccatggctgccactacctcctgagccactgaaaccatctgttgagaaactgtagttgctgcaaggagagaagataataaaaattaaaatttatacagcataaagtttttgtttgagtgctatttggttgggttcttggtatctgataaataaggccaatggctttaaggatcttcttccttaatctctgtatgtcagagtctatctttcattagttctctatctcacacttattacttctatcaaagaaaggactgaaatgagagagggaatgaaaggtagaaacaattcaagcaccagcattccttagaggttgacttgggataaggcatctttttcactaatgacagaaaataaccacacagtgaaaaaagcagaatataaaattttgtgagtacacttacacacacagtgattgcaactatgtaaaaaggagaaacatgaaaaaataatgaaaggaaataggctaaaatgctawcaatggtaagataatggcagatatttccttaagtgatctgctggctggtttatgttcataggtcactgtggtagcttcaaaatatatctacaaattctttgatattcctctcttctaattctgctccccttgggtatggactatacttaaaatataaatagaaagtgataaaactgatagtgttaggcttcagagactaggcttcttctgctctctcttggagcacttgctctggaagaagccagctgtcacgtgagaacattcaagcagccccatggagaggtatgtgtaatgaggaactaaagccttctgtcatcagccacatgtcagagattggaagcacattctccagctccagttaagctttcagatgattagagctctagccaacatcttgatttcaaccccagaaactctaattgagaactacctctggggctgaatgcagtggctcatgcctataatcccagcactttgggaggccaaggcgggtggatctcctgaggtcccgcctcggccaacatggtgaaaccctgtctttacaaaaaatacaaaaattagctgggtgtggtggcgcatgcctgtagtcccagctactcgggagactgaggaaggagaatcgcttgagattggaaggcagaggttgcaatgagccaagatcacgccactgcacttcagcttgcggggggaaaagaactacccctggccaggtgcagtggctggtgcctgtaattccaactatttgggaggctgaaatgggaggattgcttgaggccaggagtttgagaccagcctgggcaacatagcaagatcccatctctaagaaaaaaattttttaattagtcaggtatggtggtgtgtacctgttatcctagctacttacgaggctgaagtgagaggaccacttgagcccaggaggctattgggaactatgattgcaccattgcaccttagcctgggcaacagagcaggccccgtctctttggaaaaaaaaaaaaaaggaaccacttctgtacacttaaaaaatgataaagatggtaaattctatatgtatatgtatattttaccttgacaaaataaaatttgtaacagtgaaaaaataaattaacaatagattttctagatttaaaatcctttaagtaggctgggtgtggtggctcatgtctataatcccagcactttgggaggccaatgaggggggatcacttgggtccaggagttcgagaccagcctgggcaacacagggagacccccatctctaaaaaaaaaaaaaatggaaatattagctgggtatggtggcatgcgcctgtgggcccagctactcagaaggctggggtgggaggatcatttaagcctgggagggtgaagctacagcaagccatatatgatcacaacactgcactccagcctgggtgccagagcgagaccctatcttaaaaggaaaaaaaaaaaaaaaaaaaagacaatgagtacaagctgggtgtagttgctcacacctgtaatcccagcactttgaggggctgaggtgggtagattgcttaagctcaggagttcgagacaagtgtgggcaacatggcactcttgcctctactaaaaatacaaaaaattagccaggagtggtggcatgcgcctatggtcctagctattttgggggctggggtgggaggattgcttgagggaggccagggacaggggttacaatgagccgagatggtgccattgcactccagccaaaaataaaaaataaaaatgaacaaagaaattgagtaaatattaataaaatgaataaattaaaataaaataaaaaatattaagtatttcttaaaaagaaaaactagctaggtcacttttaagttcctcacctacagaagctgtgagaggataaatgtttcattatttgtttgttttttaagacggagtctcactctgtcacccaggttggagtgcaggggcgtgatctcggctcactacaacttctgcctcccggtttcaagcaattctcctgcctcagcctcccaagtagctgggactacaggcgcatgccaccacgcctggctaatttttgtatttttagtagagacggggtttcgccatgttagccaggctagtctcgaactcctgacctcaagtgattggcccgcactggcctcctgaagtgctgggattacaggcgtaagccactgcatctggccatttaactgttttaaggtactaaactctggagtaatttgttgcatagcaacagataatacaattatacaaactaggaaggattaatatttcataagtaaagatctaaaaatgactgaacaacttggttcaatcaaaagttaaaatagatcccaatatgctaagagtgagattctgtgcttaagaaaatatagctgctaagacatgataagtaattactggttagccacacgtataagaggaaaaaaaacaactggggttcagagcagaatataaactcttcagaccagacttttccctgaaaagaacagtaaagtgtcataagaattgtgccctccatgaccatgtgacaccacaacatgtacaactggatgctgtacctgaaagtgaaaccttccaatattctcagctctacctgactaggtccttattaaggtggtatgtccagttctactccgtatttgagaactggtggatagaacactgaattttggggtagttactgggaagaacattttacttataaaaagggataaacattcaaacaaactaatatgaaaagatgtgacaggtttttttcttataagtctttaagctagataaatttttggatctttcttagctaaggctagtgggccagaacaaagaggaatgaggagcctgagcaagcattttgccactgagatctccttggtttaactttcactataataaaatgtggaagactaccttacagagatgggatctccctgtgttgtccaggctggtcttgaactccaagactcaagtgatcctcctgcctcgcgcttctaagatgctgcaattacaggtgtgagccactgtgcctggcttgctacccattctttaatgttctgctttaatgctactccactgagaaacctctccagtgttggcactacccactccctatcccaacagaattctttcttctcgtgctccacggcattttctattgtcaccttctcacactatacatcacggttaactatgtttgtttctatgtcctctaacaggttgtgagctctttcagagatatattctatttatctttgttttcctccaaacctagacagacagatcttgcacataacaggtgtactggtgttcaagaatcattatgtttatcacctcaagtcttggccattgtcatcagaagccacatcttccacatgtacctggtcacactcctgttaaaagacaaaacatattacttcagtccagggagtagaagtgatattaccatcatgacatactataaaaagaccatatacagtggcaggataatgaaatgccttatggaatctcttatgtgtgggtgatcactctcacaccccttgctgtccaattcctcttaagacctgattcacatcccagtcttcatgagttctgtaactatcccatcccttgtttctactcctatctcaatatttcatttctccaacagctcatgggaataagcacaagctcccttacacttcaaatgttcttatgtcctacaccagactgtaagtcctattacaatgcaggtctcttggggcaggagccacatctcacatctcctttgcatctctctgatctagtccagtatccttacgtaggttgtgcccaataaatttttatagacaaaacagacgctggtagtgtggtatcaaaaccgagaatgactgaaatttctaacttcaaagtcaggagttagaagaggtcatctaaatcaatctcctcatgttttaaaagtgaggtgaaatgattttctcaaagtcatacaattagtgagtggmagaaagagactagaaataacccaggttttctgcttctttttttcccccgcttctaatccaaggttctttccaccaagcccatgctactactgacataaaatgccgcccactacctaactgatggatgtactcctctgataccacttagggtacctgcatcagaatcctctggggaagttttttaaaaatgcatattcttgggtccatcccagacctacttgaatcagaatttctgagagtgaagtcctagaatctccacttttaagaagctccccaggtgattcttatgccccctaaagttgagaagcactgacctggggggcaggaacacattcaggtcaaattcttcacagaactttcagttcctgagtgaggactatgtctagaaaatcattacaaatacaattggcaataattattggcatgtagtaggttttcaataaatgtttgctgaataaaaactatgatgtcctaatttatcaacatatgaagttgagggaagattaaagcattatggagtttagacaaaagtactggagctcggggcactattaatttattgaagaattgtctgttgagtagaacagacgtttattttaaaagagatgggattactttgtgttggctgggtgcagtgctcacgccggtaatcccagtactttgggaggccaaggtgggaggatcacttgagctcaggagtttgagaccagcctgggcaatacagtgaaaccccatctctattactaaaaaaaaaaaaaagattaaaaaaatgattactttgtgtttataaaatactatctttttattttttattttaaagacagagtctctctctgctgcccaggctggagtgcagtagtgcaatctttgctcactgcaaccttccccttctgggttcaagcaattctcctgcctcagcctcctgagtagctgggattacaggtgtgcgccaccatgcccggctaatttttgtatttttggtagagacggggtttcaccatggtgctcaggctggtctcgaactcctgacctcaagtgatctgcccgcctcggcctcccaaagttttgggattacaggcatgagccaccacgcccagcctataaaatcctatattactttactttaaaattttcactatttttaaaactaggtaaaacatgtactacacagctcaaaattcaaaggacatgaagtgaaaagtgtgctccctcccacctttgtgtcctggcaactcatccctctccatagatggtaatcagtgttggtagtttcctgtgtaggatgactgcataactgaggcccagaatgggaacataactttccctatgtgagattcacattctggtcttctgactccctgtcctgtgctccttctgctacaccatgttcaccttaaaggtgaactcaaatgtcaaagccaaaaaatttcaccatgaagctcttagtgtttcctggtttttctggcacctaactataaaattattctgaatatcaaggttaacctacatatgaacaacaaatatgtataaaatatgatgggttagagtaaccatttatagattcgacaaatcaggagactatcctttaagaatgtaaaatggaagaaaagtcaaaacataattgagagtacaaataatcaaactcactttatatatattatttaatatagattattaagttagaatattggtttatatgtcagtgttttgcctgatgggttggcctttcccctagtgctagatcacctccaaataaactaacaaaaatcaaatttttgagccaataaaattgaatgtcagaaccaaaactgtggtgacccaaccacaagtactatttctctaagactatgtatgtatgccttagtggccagctggcctctccatatccaccctatctaaacacatatcttctaatataataagcaaaagctctaaatagttattgaatgaagtgtctcagtgaagcacagaaacaatttaaaatgcttacctctaagtcattgaaaaatagatgagtatcagccacttcaaaaatcatttcttccattgttaaacytgagccaatcactactgttgggtcctagaagacaataagaaaaaatcagcttgacttggtagtcacagtcctggttctaatcttcaaatttcaaaattattttaggtcaaggccaaaacacacgagctcccaactgtgcttcaaactatcattgatgcaatttcattcacagttatgagaatccaggattgtaaaatagagaagatatggacagttaaaaatttcaggactttagtttctagaaattagtagtttcataaagataaatgaggacagaaaatatgattttttttttctttttttttgagacggagtctcactctgtcgcccaggctggagtgcagtggtgcaatcttggctcactgcaagttctgcctcccaggttcatgccattctcctgcctcagcctcccgagtagctgggactacaggcatccgccaccacgcctggctaattttttgtatttttagtagagacagggtttcactatgttagccaggatggtcttgatctcctaaccttgtgatccacccccgtcggcctcccaaagtgctgggattacaggtgtgagccaccgcacctggccagaaaatatgtttttaaaaagatacaatgctgaccaggcaaggtagctagctcacacctgtcatctcagcactttgggaggctgaggcgggaagattgcttaaggctaggaattctagactagctggggcaacaaagcaagacccccgtctccacaaaaaataaaatttggccgggtacagtggctcacgcctgtaatcctagcactttgggagtccaaggcaggtggactgctcgagcccaggagtttgagactagcctgggcaacatggtgaaaccatgtctctacaaaagtaaacacagaaatagctgggcatggtggtgcacacctgcagtcccaggtacttggaaggctgaggtgggagaatcacttgaacccaggaaacagaggttgcagtaagctgagactgcaccactgcactccagcctgcgtgacagagtgagactctgtctcaaagtgtgtacgtgtgtttgtgtatttatacacatatctatatcactgtatatatttatataagatatatacattatatatacacagtaatatataatttatataaactatatcactatgtaaatatattcacatattatatgaatatacttattacattattttaatatatattttatataataatatatatgatacaagatatatacattgtattttcacgttcaggtcttctgactcccagtcctgtgctcttcccattatatcttcttcagctcaaaggtgaacttaaatgtcaaagccaaaaatttcaccatgaagcttagtgtttgtttataatgtaaaaaactgtttttcatgaaataatattatgtgtatatgtaaatatataaaatttttttttgccaggcgcagtggctcacgcctgtaatcgcagcactttgggaggccaaggcaggtggatcatgaggtcaggggatcaagaccawcctggctaacgtggtgaatccccatctctactaaaaattagctgggcatggtgacgggcacctgtagtcccagccactcaggggactgaggcaggagaatagcgtgaacctgggaggtggagcttgcagtgagcagagatcgcaccatggcaccccagcctgggtgacagagcgagactctgtctcaaaaaaaaaaaaaaaaaagtctcgctctgtcacccaggctggagtgctgcggcgcgatctcggctcactgcaacctccacctcccaggttcaagtgatcctcctgcctcagcctccctagtagctgggattacaggcatgtgccaccatgcccggctaatttttgaatttttattttattttatttatttttttgagacggaatttcgctcttgttgcccaggctggagtgcaatggtgcgatctcagctcaccgcaacctccgcctcccaggttcaagcgattctcctgcctcatcctctctagtagctggaattataggcatgtgccaccacgcccagctaattttgtatttttagtagagacggggtttctccatgttggtcaggctggtctcgaactcctgacctcagctgatctgccctcctcggcctcccaaagtgctgggattacaggtgtgagccaccgcacccggcaatttttgtatttttagtagagatggggtttcaccctgttggccaggctggtctcgaattcctggcctcaggtgatccacccgccttggcctcccaaagtgctgggattacaggcgtgagccaccatgcctggccaatatataaaatttttatacacattttgggattacagatgagagccaccacgcctggtcttattttataaatatatatataatttttttaattttatatatttttataatcagtttagttatatagcttatgtcagcatgccagactagacactaaaagcctgtagaaaatactaacagaggctgggtatagaagctcatgcctataatcacagcactttgggagactgaggcaggagaatcacttgagcctcagatttcaagatgagactgggcaacatggcgagatcccatctctacaaaaataaaacaaaattagccgggtatggtggcatgtgcctgtagtcccagatacctggaggactgaggcaggaggattgctttagctcaagagatcgaagctgcagtgagctgtgtttgcgccactgtactccagcctgcatgacagagcgagatattatctcaggagaaaaaaaaaacacaaacctcctggccaagcacagtggctcacacctgtaatcccagcactttggaagaccgaggcaggcggatcacttgaggctggagttcgagtccagccttgccaacatggtaaaaccctgtctctactaaaagtacaaaaattagggctgggcgcagtggctcacgcttgtaatcccagcattttgggaggccgaggtgggcggatcacgaggtcaggagatcaagaccatcctggctaacacggtgaaaccctgtctctactaaaaatacaaaaaaaaaaaaaaaaaaaattagctgggcgtggtggcaggcgcctgtagtcctagctactggggaggctgaggcaggagaatggcgtggacccaggaggcatagcttgcagtgagctgagatcacgccattgcactccagcccaggtgacacagcgagactccgtctcaaacaacaacaacaacaacaacaacaacaacaacaacaacaacaaaattagccaggcatggtaacgggcacctgtaatcctagctacttgggatgctgagggaggagaatcatttgaacccgagaggcagaggttgcagtgagcagagatcatgctactgtactccagcctgggtgacaagagcaagactctctctcaaaaaacaaacaaacaaacaaacaaacaaaaaaacccacacctactaacaaaaacattagtaaccatatgaaataactggaagtaacaggacaggtaaaggaggcaaatatttttatttttagagatggggtctcgctaagttgcccaagctggattcgaactcctaggctcaagcaatcttcccacctcagcttcctgagtagttgagactacaggtgcatgccactgcacctggctggggtgcagatatttgtataaaatttattcatataaactgaaaaacatgagcttggaggtaatttagaatagaaatacacagcctaatagtctcaaaacagcccatccttctgttaaaactgatatgtacactgaagatataacaagttttgcttggtgtatttagtttaaaaagggattaatctattttagaaagatattttatctatatattttacttatatatatctggcatatatttggctaaataaaatgctcaatttgggctgttaaaagtgtgttaaggaataagacatcagcctctggaatttattaatataatcttgagactctgctctattttgagcctcatttctatactttaatcttcacaaaatgccattctcctacaacttcagctttcagcattggttctagtagtttctaactttaccactttaccatcaattctgcctgaccatgtagcctgcctaatacaagccatttgcaagccatttgttgaagttttacatggaaagtgaaaagccagccaacaggggtagcagagaaataatttgttatgtgtcagaagagggactgactatatagtcagaagagggacagttacaacaaagaagactcaaattacctttccatatttctgggcataggatccagtaagaagtgagtggaagatgatgatggtttcatccaagtcccacagaaatacccgctgaggaaagaaaatataaaaaatgagtatattttccaattacaatggaatgaaaccagaaatcaataacagaaagagaactgggaaattcataaatatgtaggaattaaacaatacaatcctaaacaaccaatgcgtcaaagaagaaatcataagtgaaatcagaatataccttgagttgaatgaaaacagaaataaaacattaaatttgtggaatacagtgaaagcagtgctaagaggaaaaattatagcttattttatatatatgtattacattttacatatatatatgtattttatacatacattaaaaaagacaaatgatcccaaatctatgacctaattgcatatcttaagaaactagaaaaacagcaaaataaacataaagctagcagtaggaaggaaataacaatggctagagcagagataaatagaagagagactacaaaaacaacagagaaaaatcaatgaaacaaaaagttggttctttgaaaatatctataaaattcacaacctttggctaaattgactaagggaaaaaaaagaagattcaaatgactaaaatcagaaatgaaagtggggacatcactaccagttttatagaaataaggattacaagagaatactatgcacagttgtataccaagagattggataacccaggtgaaatggtcaaattcctagaaatacatascataaagtaccaaaactgtctcaagaaggaatacaaaatccggtaagagctataactagagtaaggagattgaatgcataattaaaaacatcccaacaaagaaaagcccaagacaagatggttttaatggtgagttcttccaaacatttacagaattaacacgaatcctccttaaactcttacaaaaaaaggaagaggagggaatacttcctgactaatgcaatgaggcattatcctgataccaaagtcagactaaggcactgtaagaaaactacagaccaacatctcttgtgaaaatcaatataaaaatactcaacaggccaggcacagtggctcacacctgtaaacctagcactgtgagagcctgaagcaggcagatcgcttgagcccaggagtttgagaccagcctggacaacatggcaaaacaccgtctctacaaaaaaacacaaaaattacccagttccggtggtgcatgccggtagtcccagctacttgggaggctgaggcgggaggatcacttgggcgtgggaagtcaaggatgcagtgtgcagggaccacaccactgcactccagtctgggcaacgaagtgagaacctgtctcaaaaaaaacccaaaaaacaaaaaacccccaaaaaaccacacatctataaaactaaacaaaatagaggtaaaccaaattcagcagcatattaaaagaattaaacatcatggccgggcatggtggctcatgcctataattccagcactttgtgaggccaaggcaggaggatcacctgaggtcaggagttcgagaccagcctggccaacctggtgaaacctcgtctctactaaaaatacaaaaattagctgggtgtggtggtgcacacttgtagtcccagctacttgggaggctgaggcaggagaatcacttgaacccaggaggcagaggttgcagtgagctgagattgtgccactgcactccagtgtgggcaacagagagaggttctgtctcaaaaaaaaaaaaagaattaaacatcataaccaagtgagattagttctcagaacataaggatgtaaggatggttcattcaacattaaaaaattaattaggagtgcaaaaggcttattggaaaaaaaaattatgcaaagtaatgcatcacattaatagaacagagggggaaaaagctacatgataatctcaactgatgcagaaaatgcatttgacaacattcaacaccctttctattcctagtttattattttttcaataaatgagggatagaagggaatgttatcaatatgataaaggccatatataaaaaatccataactagccgggcgcggtggctcacgcctgcaatcccagcactttgagagactgaagcaggtggatcacaaggtcaggagatagagaccatcctcgctaacatggtgaaaccccatctctactaaaaacacaaaaaattaaccrggtgtggtggcacgckcctgtaatcccagctactcaggagtccgaggcaggagaatcgcttgaacctgggaagcggaggttgcagtgagctgagatcatgccactgcactccagactgggtgacagagcatgactccatctccaaaaaataaataaaaaataaataaaaataaaaataaatccataactagtaccacacctagtggtgaaagactgaaagttttactcctgagacaaggatgtctgtttttgccacttctattcaacatagtactggaagttctagccagagagatttggcaagaaaggggaaaaagacatccaatttggaaaggaagaagcaaaattatctgtttgcagatgacataatcttttttttttttttttttttttttgagaaagagtgtcgctctgtcacccaggctgaagtgtagtggtgcaatctgggctcactgcaacctccacctcctaggttcaagcgattctcctgcctcagcctcccaagtagctgggattacaggtgtgcaccaccaggtccggctaatttttttttatttttgtactttcagtagagacagggttttgccacgttgaccaggctggtctcaaattcctgacctcaggtgatctgcccacaaagtgctgggattagaggcgtgagccactgtccctggccgatgtgatcttatatgtagaaaaccttaaataacccagagaaaattgttaaagctaataaataaattcagatatcagctgtatttctttctttctttctttttttttttttttccgagacagtcttgctctgtcacccaggctggagtgcagtggtacgatctcggctcactgcaacctccgcctcccaggttgaagcagttctcttgccttagcctcccgagtagctggggttacaggcgcctgccaccatgcccgtctaatttttgtatttttagtagagacggggtttcaccatgttggtcaggccggtcttgaactcctgaccttgtgatctgcccacctcagcctcccaaagtgctgggattacagactgagccactgcgcccggccaatcagctgtatttctatatacttgcaatgaataatttgaaaaggaaatttaaaaaccttttgtgatagcatcaaaaagaaaatacttaggaataaatttaaccaagtaggcatagctaaataaacggaaagacatccatgttcatggattagaagacttaatattgtaaagaagacaatactacccaaaccaacctacaaattcaacgcaatccctatcaaaatccaatagtagttttttaaaaaaatagaaaattgcattctaaaattcttatgaatctcaaggaaccccaaatagccaaaactgtcttgaaatagaacaaagttgaaggattcacacttcctgatttcaaaacttacagtaaccaaaacagtgtggtactagcataaggatagacatagagacgaatgaaataaaccgagagtctaaaaataaagccttacaaatatgatcaatttttctttttctttttttagtttagttttttaccttcttttagtatttaacctacagccaacatcataagttaatttttaataggatgccaaaaccattcaataaggaacgtcttttcaacaaatagtgctgggaaaactggatatccatatgcaaaataataaagttagaccattatcttacaccatatacaaaactaactcaaaatggagaacagcctaaatttaagagctaaacgatgaaaatctcagaaaaaatacataaaaatcttcataaccgtgtattaagtattacaccaagaaaacaaaacaaaacaaaaagaaacaacaagtattagaccaaaagcacagcaataatagaaatcagacttcctaaacattaaaaatttttgtgcttcaaagcacaaaaattgagagagtgaaaagacgacctacagaatgggagaaaatatttgaagattatatatctgattaatataagggattaataatctagaatattctagaatattaatatagaatatacaaagaactcctacaactcaacaatgaaaaaccaaacaacccagtttaaaagtgggcaaaggttctcatgcttgtaatcccagcactttgggaggctgaggtgggtggatcacctgaggtcagcagttcaagaccagcctggccaacatggtgaaaccccgtctctactaaaaatacaaaaattaaccaggcgtggtggcatgtgcctgtaatcccagctactcaggaggctgaggcacaagaattgcttgaacctgggaggcagaggttgcaatgagccgagattgtgccactgcactagggaaatgcaaatcaaagccacaataagataccacttcacatccattagaatagctattatcaaaaaaatgggaaataacaagtgttggcgaggatgtgaacaaactggaacctttatgtatcgctggtaagagtataaaaccgtgcagccacaatgaaaaatagtttggtggtttctcaaaaagtggagcacagaattacaatagcatccagcaattccactcctacatatataccaaaaagaattgataagatgaactcagatagataattgtacaccaatggtcaaagcagcattactcacaatagcacaaaggtgacaaaccccaagtgtccatcaacagatgaatggataaacaaaatgtggtatatacatataataaaatattcagacataaaaaggaatgaaattctggtatgtgctacaacatggatgaaccttaaaaacattatggtaggcagggcatggtggctcacgtctgtaatcccagcactatgggaggccgaggcaggcggatcacgaggtcaggagtttaagaacagactgaccaacatgttgaaaccctgtctctactaaaaatacaaaaattagccaggcatggtggtgtgcacctataatcccagctactctggaggctgaggcaggagaatcacttgaacccgggaggcagaggtcacggtaagccgagatcgtgccactgcactccagcctgagactccatctcaaaacaacaacaacaacaacaacaacaacaaaaaaccattatggtaaatgaaataagtctggcacaaaaggatacattttctgtgattccacttatatgagatatctagaataagaagtcaaagacagaaagtagaatagaggttaccagaggttagaagaaggggagaatggggagttactgcttaatgggtacagagttttcatttggaatcatgaaaaagttctagaaatatacagtggtgatggttagacaatattgagaatgtataatgacactaaattgtacacttaaaaatggctaaaatggtaaattttatgtatattttagacaattaaaaaatgagttatcagtttttcctaagaaatatatcagaaatttactttttctttctttcttcttcactccaaacctctgaaaaaagagaaaaggcttcaaatacaggctcagttcacctatgtcttaagagcacttatcaatggattcatagttaaatatgtattttcccctcagtacataatagcactatagaaaaacggaaaacagaaaacaaaaagataatacaaaaactccactaattttagcactctgcatgacctttatgtctttaatgatgaagtcaaatgtatgtccataataaactcatatagtacttacactacagaataaatcagcaccagtctcattaataagttaccagatctgtttgcgccttacagaaacttggctaaaagcactctagtcctttccttttaaatttcttttctttttgagacagagtctcactctgttgccctggctggagtgcagtggcccgatcatagctcactgcagcctcaacctgccaggctcaagtgatcctcccatctcagcctcccaagtaggtgggactacaggtgtgcagctaattcttgtatatatatatttttagagatgggggtctcactatgttgcctaggctggtctcaagcgatcctcccgcttcagcctcccaaagtgctgggattacagatgtaagccaccgcacctgacccttttaaaattttaaatagagaacagtatgactttacttgtaactccctctgctttctgaatatgatgaattgtttctgttctcttctggaatatacagaataatttgttctttttacatttttcttttaacgtggccaatttagtttattttgctcaggaattaaagggcacataacatagtgcacattatctctgtgagcttcaaaaacatgtttgataaacttaagaagtgagaaagaacaaagtaggtaactaaatcagtttcttctcatacttctaattcactgtcttgggaagaagtggcatcagctttcctcttgccccggttcttgctagtcatgtttttcctggactgatcatcagtatctttacttggtgtagtctgggacaaagatggacttgtagaagggtctcctggaaagaaaaagtgaaacatatgttgtcaggagtcacaggctataagaatcagggcaggaagagggttagtggactctctgcccttgtgagtcataatgcagggataaaggttggaaagctaaaccttatgtaagcaattatgaagtgtacatctaggcattgagcatcagcactggctaacatcagaaaagttataaccagactttatatgcttaccccatgatagaagaaaatatcaatgaagttgttttgccaagaaaaagctgaacctgaatcttcatggtcaaacttgtagattagagtttctcaacctggcacaactgacattttggatcagataattatttgttgtggggggatgtcttgtgcattataggatgtttggttaagcagtatccttagcatctacccactagatgccagaagcaccgccccacctagtgtaacaaccaaaaatgtttccatacattgccaacagttgaaaacaactgttcattcaccaatttactataaaatacagaaggcagcaggacatgttaaaccaccttatgaggatataactgtcaaaattcagactgggaaacagtatgggatcaacactccagtttcttcaacaaacaaactacaagggggagaaaaagagacgggaggatttataggttaaaatagagatgaaacacaaaatacccataattaccaatcacaatttatggaccttatatttggatcctaattttccctcctcaaattttctatttatttattatttctatttactaatgcgataaaaactgtatatgctttatgttgttttgaaatatgtatacactgtggaatgggttggatcctactttaaacaaaagggaaacaaaactcataacatttatgagaaagctggaaatacaaatacattttggtacttgataatacaaaattaagacattattaatattgaacttttaaagatgggataatgccattgtggttatgttaataagtaccatacttatmttttagagaacaatgcctggaatctggggagggagctagatgatgtatagctgaaacaaaattgtctataagttgataactgttgaagatgaatgatggatatgtaagtgttcatcacactagccttgcaacttttctctatgtttgaaattctccaatattcaaaagttaaaattgttataacaaagatatttagaaaaatgactttaaaaccttagtttttaatcaacacttgtaattatttcaaatttatgtaagtttgaagtggcgaccatttgtatgtccacttattagactggtagggtgaccgcacagaaaactgttcacttgttatatagtactgtttctaaacatgcatcagtgccaatgataaacagtgctttcctcgaaccacatgatgtgaaagccaactaccaaattttcattaaatataaataaaaagtgtgtgtatatatatgtttattaaatgtgtgtctaatcttttatgtcaaaggtttttaagttggacactgtaattcattgatacacttcagagctgtgagcatactgaaattgtaggttaaattgtatatatttctctgagggaaaaggaccatgctttcctcagaatcttaaagggatcctggacatagaaagaactatggctctgaggccttagcagcagttcaaaacctgcgcaagactaaaactggagtcctccaacttttacaaaatattataacatgctgaagctccctgtggcaagtgggttaaagctacagggagggtagagtaygagtcagaaagagtcttttagttcttgatacttttctgttccgttctcagcatcaggtatacattcagcctaccaatgactcacagcctgcttccaatactcctcacctcagagggaaagccaaaagcatggtaacaatgacttaagacagaacaaaatcatccttaccattgcctaaaaacaactgttggatgaagtgaccttaagccaaagttttcagagctgcggtgcttaccagaggaaagtctctgtgctgcaggtgcaggcgccatgacactaggcttctccgactggtatgtggttgctgctaatgtggtgctctctgcatcactgttagtctgacctgtgactccaaagctggagctggggtagcaggcctggtactgattctgaccaagaatagtataggtgggataatcctgcaggccaaaggaaataagaaaacaagactcttatagcatacattaatctcaacacaagaggctttcttctccctctttcttattcataattatttttctaaaacattaatttgacttctcatttacctacctaaaagtctccaatctaaatcaatgattttcaaaatgcattctgtggaaacctaagtcaagagatgtcccaggagcagtcttggaatgaggaaatgctgagagggaagggtcttctgtactctcataaacatacacatggtgtccctttttgtactctaacagcctcttcccccagttttatgtaccgaatttctgcacagaatttgagggaaagattctactctaagaggtttacaaactgttgcactagataatagcacttctaaggacaacaaaacaaaacttaaacttaagcaaacaaaaaaagcacatatcctacattaaaatgtcttaatttaaaaactgattatcagctgggtgcagtggctcatgcctgtaatctcagcactttggaaggccaagatgggtggatcacttgaggtcaggagttcaagaccagcctgaccaacatggtgaaaccctgtttctactaaaaatacaaaaattagcctggcgtggtggcacatgcctgaaatcccagctacttgggaggctaaggcacaagaatcgcttgaacctggaaagcggaggttgcagtgagccgagattgcatcactgcactccagcctgggtgacaaagcgagaccctgtctcaaaacaaaacaaacaaaaaacaacctgattatctacctaaaacaatcaagttttctttaaaaatagtttcctggcmgggaacagtggcttacgcctgtaatcccagcactttgggaggacgaggtgggaggatcgcatgagctcaggagtttgagaccagcctagccaaaatagtgagaccttctctctactaaaaatacaaacaaacaaacaaaaatccaggcatggtgatgcacgcctgtggtctcagctattcgggaagctgagatgggaggataacttgagcccagggggcaaaggttgcaatgaaccaagactgcaccactgcactctagcctaggtgacacactgtctcaaaaaaaaaaaaaaaaaaaaaaaaaaaaggccaggcacgggagctcacgcctataattccagcactttgggaggctgaggcaggcagatcacatgaggtcaggagtttgagaccagcctgaccaacatggcgaaacccagcccctactaaaaatacaaaaattagccaggtatggtggcatgcacctgtagtcccagctactagggaagatgaggcaggagaatcgcttgaatctgggagacagaggttgcagtgagctgagatcataccactgcattccagactgggcaacagagcaagactctgtctcaaaaaaaaaaaaaggtttcttaaaatattgggataaaacttttggtttcataggcacatatatggcaaaacttactaaactgtacaatttaaatctgtgtagttyactgtatgtcaattactccctaataaagctgtaaaaaaactaggtatgacagttcaaatacgcagctaaaaaaattccattgacactgataatgatggcaagtaggaaaaagctaactgatcagatacattatttctaattagtcattgggtatctctaccataaaccaaatataattatatgtatgtgtgtatttgtgcatgggcagaagaaggaaatattaaagaaaagaataagtcacactagcagaactcaagggagttaaaaatctagcaggagagaagacagacaacaaaatggcaataaaatatatgtcaaatgactgaaatacagaacagacaactatcattgtaaagtatgatggtgaagaagctttctgagattaataggcagagaaagtaagaacatgaataggctctgaggagattttattcagggaccacagatgctgagtctggttgaaacaaaggacctctgtaggcctgaatgattggtaaagcaataagacttggattctttaggcaatagtatatagcctgtgggctagggaatagggaatggggactctcaaattcaaaccaacgaataaaaacatgaaaagaaggagaatggcrtgaacccgggaggcggagcttgcagtgagcagagattgcgccactgcactctggcctgggtgacagagcgagactctgtctcaaaaaacaaacaaacaaacaaaaaacatgaaaatattctgagcaggtcagtaacatgacaaaaagtgggatttagaaaaaattaatgagatagtattttagagaatgaacaggcacaagggggaaaaaactggaaataaaatgagcaattaactatggtaattcaggattaaaagggaaaataccaaaacattggagacgatagcaaaaagcaaaagaaattcttctcaaagattttgagaaatgaccagattgggtaaggttgtgagaaaaataatggaagatatctggtctggttttaggcctaggtttattaaraaaaatgtagtatcactaataagaattaagaagtcagggaaaagtggttttacttctggaagacaaagagacataaaaagggctggaataaaagtctgattttacatatgttgaacttagggaaacagcaagacattaaagaaaaaaatgtcaatcagttggaagctgtaattatcatgagggaggattagaatctttggtgacagtaaatggacattatgtggttaaacatccctgtggatgaagtaattaacatgtggaaaaaccaaatagagactgtccacgttcaaagacagggtcaaaaagaagagctatgagagagaaagagacagtccttagaaaaataccaggtacacaggtgggaactcaataaatatttgtggactaaaagaataaacaaggctgggcgcggtggctcacacctgtaatcccagcactttgggaggccaaggcgggtgcggttcactctaagtcaggagtttgagaccagcctggccaacatgtgaaacctcatctctactaaaaacacaaaaattagctgggcatggtggcacatgactatagttccagctactcaggaggctgaggcaggataatcacttgaacctgagaggcagaggttgcagtgagccaagatcgcaccactgtactccagcctgggcgacagagtgagtgagactccatcttaaaaaaaaaaaaaaaaaaagcaaaaccagtataataaccagaatagtaatgttaactgtagccaggaaaagatccaaggagacagtggtgatgataattgctgtagagaaaacaaatcaaaacaaaaataaaaaactctagaacactgaaggtgttaccagtgatctcctaagcatagttaacataacagtgatcaagaatagaccacaaaaaattcataaagaatgagttgttcattccataaatatttatcaagtgcctttgatgtaagtggcaggcatttttctatactctgggaatatgtaaatgaacaaaacagaaaaataaatccctaccttcatgcagcttacattctagtaggggcagagtaggaagtgaagacaaatacagtaaagaaacagacataaccatattctagagagacccagcagaggaacaacaaaaactagacagtaacctaagatgccatccagggtccgagttctgaaggtatccagaaaaaagtctccacagcccatactattcctggttgtttcttagataggcaaattgaccatggaaagaagaaagagcaagctggatgaactctatcaaacaggatgaacaaaggtagcatcatacctggtttgagatgctggctactgctgctgctggaatattggcaattgtagaagaagtagatatcaggctggcatttgtgcttgaagctagaggattgatggggttaaaagatattaaagatattatgtaaaaggttagaagaaactgaaaatagatgtgttttaagtgaacagatttataaggagataaacaacattggcaaaggaaacaaacactcgttttgcttttttgtrtgggatagctacatttacacttggttaaaaacaaaacatttgaaacatctttctgtttcaacttgagtcttcaattcttcttattaaaggcctaaaaggatatatattcaattcacagctcatactaataatatcaatgaaatcacagctaaatccaattcctccagcccatcttctccagaggctgaaaaatgactcacctgcaatgtgacctactgtaaagcagtagaactctggtaaatcttacactgtgatattgtttgctgtcacttgccccaagttacgcctttcctaatacaacataattacatgagaaatagagctggtcctccaaattccaaagcatttagaattgcttcttgagttctactcaaataatagattactaatgtggatcaataaacacaatgacatagcatttagagactttaacaatgagcctggaaaaactcagaaaatattaaatattactctggtcagataaaaatgtaccttatatgatacttgggctgtcttaagtaatttgaggccaggtgtggtggctcatgcctgtatcccagcactttcggaggccgaggcaggcagatcatttgaggccaggagtttgagaccagccttgccaacgtggtgaaaccccatctctactaaaaatataaaaatgaactgggtatggtgggcacgggcctgtaatcccagttactcaggaggctgagacatgagaatcgcttgaactcaggaagtggaggttgcaatgagccaaaatcgcatgactgcactacagcctgggtgacagagcaagactctgtctcaaaaaaaaagaaaagaaaaaagaaaaaaaagaaagaaaatgctgatttccattcacataaaacaataaaaataaagacaagtaatttgggttaagttttatacttcttctgtcataggttcattctactagggttttaatcaaaatctcaatgactagcactaaccagtgacttttctcaggtgaacaatgtaactgatattatcagtactgttctcaaactccttgtcctcatttatcataaacacacttagacatggttcctactgcaggtacacacaccatatgggttcaccatcaggtagacctgactaactgactacctgccccattaacaaagtcccccagagagaaaattagtaagaaaacttccattgagaacagggcaggagaacaaatgcaatagaaacttaagtgctctggtcaaaattagataattttcatccctttccctaagggtactcggcttagaagacaatccagaagacagtaagttcagttacagctattgctgcaaccccagctttaagatgaagaacctaggacaaagaagaattaaagtaacttgtccacagcagcaaaaataatggaagataaccaaaatgacaacttggatctcccaattcttcatccagtgcttcttcctcagggtcagcagctaagctagggttcaaattccctaactatggccaggtgcgtggtggctcacgcctgtaaccccagcactttgggagcctgaagtgggtggatcacctgaggtcaagagtttgagaccagcctagccaacatgatgaaaccccatctccactaaaaatacaaaaattaaccaggtgtgatggtgtgcacctgtaatcccagctatgcaggaggctgaggcaggagaatcacttaaactcgggaggcagaggttgcagtgagctgagatcgcgccactgcactccagcctgggcgacagagtgactcagtctcaaaaaataaattaaaaaaaattaaaacaacaaaaacaaaaacaaatttcctaactatccagagtaactttattttctatagcacgttttgcttcaggggaactaaaggactcttaagggcttactttcctaaacataacaactaaatgaaataggttttatagctttacagaaggtattttctttcaaccaatattcaccttctttcctactgtggcttaagccatcctttttcctaagaggaagcatcaaaacatgacaatatacagggtaactgactctgtaaatggttttaaccattcttgtaggaaaagaattttgaatggtttccagattttgttatcagtacattatcctaggcaggcctgcaataaaactgaacacaggtgatttaaggtgggaaataaaataaagaattgatttaatcatttatcttccccagcaagtccatttttagttcagttttcttctggccctggtcctggcatacaatcctctttttcacctattgatctttaattctgtcctaccttctccatatcctttttttcttttttttgagatgagtatcactcttgttgcccaggctagagtgcaatggtagtctcggctcactgcaacctccgcctcccgggttcaagaatcctcctgcctcagtttcccaggtagctgagattacagacatgcaccaccaagcccggctaatgctgcattttttttagtagagatgggtttcaccatgttggtcagggtggtcttgaacacctgacctcaggtgatccacccacctcagcctcccaaagtgctgggattacaggcatgagccaccacgcccggctacttctccataacttaataatggtgggaggtacaactcagtcatatctgatctctatgggggaaaatgtactctgattgacaaggtggttttacaaatctaacaattttcaaaccacttaatgaattgtactggaggtaaaatggtagaccttaaaaacaactagccataaactcttattatatcccggctagaaagtttaatggcttgattagctagttgataactctgagtttttaacaagtactgtattaaaatcacaaatttctctgagcaatagttggcttttattataggggaacttggtctgctgacccagaaagttcatagggcttaataacacttttttctccaactaagccaaattatttctaacatgtgccactcattcattcagcaaacccattaagtatatcagggtcaactatgtgcctagaaaccatttcagccactgaaggataaaatagtaagacaaagtcctggccctcaaggagtttaaattctagtgagggaagttagtcaataattaagtaatttttttaggctcttataaccaccatagaacccaaggcaaactcgcctaaaaatgtatacaaccactgcctgccctaccccacatacagctatgackaaaaagccaggcacttttaaaaaaatacagatcatcgtgtgtgtgtgtgtgtgtgtgtgtgtgtgtgtgtgtgtgtgtgtgaataaaaataatattcaattgcaggtttaaaaacaaaagcagcaacaatgaactatgcaacaaaaactacaaatttagagaatcaaataaaactcaagtgctggctcctattattatgtatctaaaggctgctagctctccaaatgctaatggcatggtcaactgtttttggacagccttcactcctgttttgacaatggagctgcaaaaacttgaaagacaccacttttgagaaccaggccccactagatgtccgcttaaaayagacaatatacagataaagctttgaacagaagaccacggttacagaatggtaagtggcacagctgcaccaagtgatagtgctacaaagttaaaagtttaattcaagcattaatggcacataaaagtttgtgcaagatttagtttttacccacctctctaattttagatcatgtcacttcacctcctttgctcacactgtctttctttaagttactcaaaaccggacaagctctttatcatttgaggacttttgcaatattgttctctctgcctagactgttctctccaacccccttgccttcccagcatgatggctcctcagcatgactcacttcctcaaagagggtctttttgacctattaaaaccaagaccttttctgttttcttaatcacagtgatcaatttttttttcagagcactgttcaaaatctgttatgtatttactcacttgttttctcccccgcaccccactagtctgtaagctccaaaaaggcagaatcctgctgtcttataatctccagcatctagcaaagcacctgacatacagcaggtgatggtcaataaatatttgtgggattcatatacatctatcttgtgtgcactaagtgtgaagggcaaaatcattcttctttttttttttttagatgcactctcactctgtcaccccggctggagtgcagtggtatgatcttggctcactgcaacctctgcctccctggttcaggcgattctcgtgcctcagcctcccsgagtagctgggattacaggtgcctgacactactcccaactaatttttgtatttttagtagaaacggggtttcaccatgttggtcaggctggtctcaaactcctgacctcaagtgatctgcccacctcagcctctcaaagtgctgggattacaggcatgagccaccgcgcccagcctaaaatcattattttctgctaaaggctgacaggtgggttcctaaaacttactctcattatgtgactaatataactgacaattcctgatccagtagaagctgtacatattttggttaaaactgattgcctaagtgggtcattcgttcacttaatcctttatcaaatatttattgagtgcctactatgtgcaagcactgctccacacaaggagcttagtaaatcaaaataataaaaatctcctaataaaagattattattttttgagacagagtctcgctctgtcgcccaggctggagtgcagtggcgcratctcgactcactgcaagctccgcctcctgggttcacaccattctcctgcctcagcctcccaagtagctgggactacaagcacccaccaccacacccagataattttttgtatttttagtagagacaggatttcaccatgttagccaggatggtctcgatctcctgacctcgtgatctgcctgcatccacctcccaaagtgctgggattacaggtatgagccaccgcgcccggcctaaaagattctcattgctggagtggagattttcagatcaataagggacagggtttagaatgatctatgtaataatggatcagagctcaagaaatcagtaagaattcatgtttaactcaacacagatacagattacgacatacagaaatatttatagatatgtgtatttacataggttagtatacctacatatatttgtttgctctgtcagctgagaaagcctaaaataaatgtcacctgacacctcagtagcaattagcacccctcaagctcagatcttttttttgagacagggtctcactctgttacccaggctggagttcagtggtgcgatcacagctcactgaggcctcgacctcctaaggctcaggcgatcctcccacctcagcctccccaagtagctgggactacaggcacgcaccactgcacttggctaatttttatattttttgtagagatggggttttgccttgttgcccaggctggaagcccaaatcttggttttgaataccattttttccaataaaaggaaccaggattccttaaaaaaaatggttgataataggacttgaataagtaatatacaagatgagcctggagcatcttgtagtgccaggaagtaagaaagtgctgggtggggggggraaaaaaaccaaaaactaaaaaaatgggagtatgtcaaaaggcataggagccaactgaaagagctcccagtggccaaactggaacaaaataaataaagtagtattggattataacccaaagtataaattaaatatctaggagtccacaaaaaaatgactgaataaatcaacaaactggggagaagagacaaatctgggcagaagaattccaaatacattatgtagatattctaccctaaagaaggggcagcatgattccttaactgtgggctgtacatagtgaattctatctaaagaatacagtacagaaagggaggaaagagtaactttatggagaaaactgacaaacactacttcaattaggtaatcaaggtcaacatcaacagtcataaataatgatgatagtatggcaccttgcctttgtgaccttcctccttaaaatccataaccccagcgtaataatgagaaaaacatcagataaattctctaagagtggggcatcttaaaatatacctggaccagtactcctcaaaactgtcaaggtcattaaaagcaaggaaaagcctgagaaactacaaagtctagaagagcctaaggagacataactaaatgtaatttggtatcctggatggaatcccggaacagaacaaggacatcatataaaaacacaggaaatctgaataaacaayggacttagttaataataacatactaatactggttcaytaattgtaacaagtgtaatatactaacgtaagatgttaataatgggaaactgtgcaggaggagggatatatgggaactctctgtactgtctgctcaacttttctgtaaatctaaaattattaataaaaaataaagtctaggccaggcgcggtggctcacacctgtcatctcaacagtttgggaagccgaggcaggcggatcacttgaggtgaggagtttgagaccagcctggccaacatggtgaaaccccatctctactaaacatacaaaaattagtcaggcatggtggcatgtgcctgtaatcccagctactcaggaggctgaggcagaagatgcgcttaaactcgggaggtggaggttgtattaagctgagatcacgccactgcactccagcctgggtgacagagcaagactccgtctcaaaaaacaacaaacaagcaaacaaacaaaaacatctattaataaaaatttttttaaaaatctcctggtcagagatagattattgtgtgttaccaatgatactagagtacaaagacactcattaaaagattgaattaggctgggcgcagtggctcatgcctgtaatcccagcactttgggaggccgaagcaggtggatcacttgaggtcaggaattcgagaccagactggccaacatgatgaaaccctgtctctactaaaaatacaaaaattagctgggcgtggtggtgggtgcctctaatcccagctacacgggaggctgaggcacaagaatcccttgaacccaggaggcaaaggttgtagtgagccgagagcatgccactgcactccagcctgggcgacagagcaagactcagtctcaaaatatatatataattaaaattaattttgaaatttctgaaattaattttgccacttgaatattatttaaccaattaaaacatctcagctgaagaaaatgaccaaagatagggccacatagtcacaagatactctaggaaaaggatgatactacagaagtcagatctactcattcaaaacatttttatgagcaaacaaaggcagtctcttctcattatggtaccactgaagtacaaactaaagaaaaggytctgcttagagttaatcaagccagaagcagattaggtttttgagataatttccctaactcccccagggaggatgggctgctgtcaactgcagaatgcttggggtgttttgaacacttaaaaaaattgggtagttatgcagggggaaagaaacagccctggatagctaacattcactatccatgctaaaaggaaagggaaaagtaggagcgaggagagtaatattgatagtggtgaacttaagtaatttaataccaataatacccacgtttcattttagcccattgttttcctaacaattttttcatcagaataaatggcaaaaattgataacttaatggttaacttctgccttaatttctaccctgtgctaatgaacaataaaatgggccaatagattaaccacaaaaagggrggagaagtgaatttagatatttgttagcaaaggttctcaattatgggagagttgatattgatactatgacctcaatactgaaaagcataaatattgtactcatgctctggagtcagaatgcccagctaatgtcctrccttaattatttgctaatactgtgactatggataagctacttagcttttctgtgcctcaggctctccctctstaaaatgaggtttgggttgttgtgaggattacgtgtgcaacatctatccactgcttagaaaaatgtcaagagcacagtaagcacttcataaatacctgcaattgtcattaatagcaaaatgaaggaaaccgggttagccaatccaaaggaaaaaatgttctaacagataacaaataagaatggtggttagtgaagtttaagggatattttcatgactcttccatttttttaaatttctatttatttttttgagacagagtctcactcttgttgctcaggctggagtacaatggcacagtctcggctcactgcaacctccgcctcacaggttcaagcgattctcatacctcggcctcccragtagctgggatacaggcatgcgccaccacacccggctacttttgtatttttagtagagackgggtttctccatgttggtcaggctggtctccaactcccaacctcaggtgatccgcctgcctcggcctcccaaagtgctaggattacaggcgtgagccaccacgcccagcctcatgactcttaaagcaatgggtcctaacagaccccaaagaggtgattcctcttgttttacaagggagaaataagcayagctatsacattcctcaaattctagacataactacagaggaatggtggttttacattttggtagagcattaagagaacccttggtcttctttcacaacctaggtgtaagttatcagatatacctgtttagaagagacttggcaactagacttacctgtggttgaacccaaaaggcctatcaacatagagaaatactaggccaggtgtggtggctcacatctataatttcaacactttgggaagctggggtgggaggattgctggagcccaggagttcaagaccagcctgggcaatatagtgagatcccacctctaaaaaaatatagaatacattagctgggtgtggtggtgtgcacctgcagtcccagctactggagaggctgaggtgagaggatcactttagcccggaaggtgaaggctgcagtgagccatgatcgcgccactgcattccagctgggcaacagagtgagactctgtcacaaaacaaaacaaaaaaccatagagaaatactctataaaaatgaaagggagtggtggagaagacaggcaaagccattctttcaagtttctccctcctggtttgttcccatcttagaaagaaagaagggggagaggacaaggggagaaaaaaaaaaaagaagaggaaacaagtgaagaaaagaggagacttggtaaacaacaggaggtaaaggtagctcagagtaaggtctcagaacatagagaccagttctgtttccactagaccaaggagaagtagttttcaaacatttctgaaaacagttaaaactgaaaatcaaaatctaattaacctatattaaaactttttttcatcaccaaagtttatacattaagagtacttcagataggtttttgaggtcccatactaatccctctactatctattttataagaaataaaatttaaaagctgggaaatatcaggagaaaagaggcagatgagaagccaggtacaaggatactagtcccagtctgaagcaatgacaaattgcctgccctggatttggaagaataggcaattaactccatagtgccttttgagttttttgttttctttcctaatagtcctgtcataattctaactctgttagaggaagaacttggaaggtaaagatgtttagagcttaagctttaatactatgctttttatcctgaaagagaaataagaatgaacttcttgagcaagagaaatgctctcatcaagtagtaaatggggtataagtgtgacaaaagacacagcagaaaagcagcacacacctcacatactgctatgacaattcatacaggtcagcaaaattccaacccatggagtcttctgctcatttataggacaaaatgccactgaaaatagactagaacaaaatcaaggcgttttctggacaccaacatgcaaaagggaaggcttcaattctattaagcagctcacattcaaaggctaaactacttataaaccacactcctaagctgtggtttgcctaacacaaaaagcatgcacaaatccaagtatcaccccctttctactttagaagacagagctcctgtattatccaatttgtttgtttggagatacaggtagattaaaaacaagaaacaataataataattttaaaacacacacacaaccatgcctatttaccttgaatgggataagaataatgtgctgggcttggctggcttgtggttaaccctgtagtgcaggtaagaacactgtgttgacttggagatggagtctgaattaaaccactttcaggtttcatacctggccacaatgcacctgaatcagataaattggaccaattacaaacaatacactgggactgaggagcatggttatgctttcaaatatcagccagtaggtttaaaatctaaatcttaaaacaaaaataaatttgcttgtaagagaaaattattgaatctcccacttgtaatatatcacaagcaaataacactttcaaagaattaggggatgaggctaaagaaacaaaaagcttgccacaaatcccaatatgtatataaattcatttcaatgactgggggaaattgaccaggattcagaaaaaaagagttattgacacccaactggagtatctgttataaagagtgcctgatgttcatgtacagtgataaataatttatccaaactgtcaaggtaggagacattccatataagtttaaaattcacttacccattaaacaaggaccaaatttttctaaaatatattaaatacttctctgccttcttaagctggttattttgttacttttgtttcttccgattaggaaagacatacctgcttatttttataaattaaaaacattacagaaatacataatttagaaaaaaaatacagtcatatataatcccatcatccagacttaaccactattaacagtttgcagaagagtcacccagatgatttcttcttcttcttttttttttttttaaataagatagggttttgctttgttgcccaggctggtcttgaactccaggcctcaagcgatacttttgccccagcctcctttagtgctgggattataggcatgagccactacactcagtccagatttcttctatgtattcactaatcttctttttaacaaaaatgggattgtgattttttgttgttgttgttgttgttaagagacagggtcttcctctgtcacctaggctcaaataatcctcatgcctcagctacaggagtagctgagactatgggtgtgtgccaccatacttgactaattttttgtagaggtggggtcttgctatgtcgcccaggccagtcttgaactcctggcctcaakcaatcctccaccttggctttttaaagtgttgggattacaggcatgagccactgccagccaaggactgtgttatacatagtgtacataatttgcttttccacataatacctctaagattcatctttccaagtcagaacatataaatctatctcatactgacaaacatcatagctgttcatttttattttctttttatcataatgctcctgagtaacaatctttctaaaatatatttatatcccttcctgccttctgagcaaggaggaaatagcacacatacctttagattttctcagttactgtttcaaaaataaaaactgtgctgtgctacatatattacagagataccgcagaggctactgtgatgtgtaaagacaattgtttagtactaaatataacttaattatagttctgatttttaggttctaatttcactgtttttcctctgtggtctgtcacttcttgacttccttagcagtatctgccttttaatttgcaataaactaggcaaccataaacaaagctttgcatctgcatgagagtccaaggatattctttatgagtgaaacactcttaagtgcatggttttggtgataattttggctacacaaaagcctacttttaaaaagaaaatccttttttttttttttttgagatggagtttcgctcttgttgcccaggctagagtgcagtggcacgatgatctcagctcattgcaatctcctcctcccgggttcaagcgactctcctgcctcagcctccctagtagctgggattacaggtatgtaccaccatgcctggctaattttgtatttttagtaaagatggggtttcactatgttggtcaggctggtctcgaactcctgacctcaggagttccacccacctcagcctcccaaagtgttgggattacaggcacaagccaccatgccaggccccaaaaatcttaatgcctggttgttcactgtgttctgaatagctatggttactgggttagtgtagttgaagctgataattaggtctaagaaggttcatcaaccaaacacattccatgtatgatatcaatactaaggttagccatgacttcaaactcaacattaactcatctcatttatttgctcctactctgataaactaggagtgattgaatttatagccaatgaacacatatatgcaattaaaaatacaatactttgagawtgagaacctctgcttcaccagggcactgagatacttcagtgcaactcagatttgtccaatttgttgataagtacatttaggaatagtaaagagaaatatgaaagtcttaaaaagaccaacagtgggatatgataatcacttcttaatttttttgagacaaggtcttgctctgttgcccaggctggagggcagtggtgcaatcatagctcactgcagcctcaacctcctgggatcaagggatcctcctgcctcaaacccccgaatagctgggaccacaggcacactacgcctggctactttttgtatttttgcagagacaaggttttgtcatattgcctaggctggtttcaaactcctagccttaaatgatcctcctgccttgacctcccaaagtgctgggattataggtatgggtcaccgtgcctggctttgccccaaactcttaatgcataaaaagaaaatgtaatattcttttctcatctattaatcacatgaaataacttattttaagagactgaggaatactgacatcgctagcatgaattagaagcgtttgccccatcataattcatgatcatttaaatgtcttgtccagattagccataattaagattcttgccatgtctgattttcaacaataaaaatatttgagaatgtcatttttaaaacatttatgatgtaaaatgtgagtatcagtgctatgattcctgctgattgtatatcacactttttggtaaacaaattgctatttcaatgtcacaataactttcagatttattgtcatcactgtgatttctttttccaaataggttttgaccctaaggtggtagatttataaacatgtttatttttacactatatgaaaataataccttattaataacaatagtatcaactgagaatgttttgatagtctccctcttataagatcaaaaattagaacacaaatgtccaaaataagtaggagatagctagctagttttgaatatctttggccagaaacataaagtagatgtctaatatataattattttatgaggaataaaaaacaatacagacagtacctccagcatcactgtagacctggctcttcagacatgcaaatcatcttcctctaaaagcaaccctcccagaattccagataataggcagcatgatccaatggtttgactccacagcactattgctcatagtaaacaaggaaaccaaaccctaattacaggactcccagtccactgctctatgccaacaactaccaagtttctcaagtacttttaagcatcaagagcctgctgcagagaaactgtcaagctaacaatgggtaagtaagtctgtctctgagtgccttcctgatgcccccagaatggggtcttatcacaaactctacccaagtttctcagcacaagtacttcactattgattagtcactatccaaactaatctcatcagttcaatttatagtaactcgtatagtgctctttagagattagtctggtgaggaactgaagtacacaccaatgctagaaaaagcacatgaaaggatattttggcttgttgattcagcagctcatttggataggctattataaatagtaagtaatttaatgtaagtacttttcctgattataaacaaagtatatgtatatattttttaaaacgtctgtaggaaaaacagccactttttttgcttccaattattctttacgcacattttttttttctttttagaggcaaggtctcactacattgtccacgccggagtgcagtggctattcacaggcatgatcccactactgatcagcaatggggttttaacctgctgtttctaacctgggccagttcacccttccttaggcaacctggcggtcccccacccccaggaggtcaccacattgatgctgaacttagtgaagatacccaatcagcatagcgcactacagcccaggactcctgggctcaagcgatcctcctacctcagtctcccaagtagctggaactacaggcatgcactaccgcacctggctatacacatatttttaaaaatactaaattggtattacaacattgtgtttttgctattacatattgcttttttcaattaataatacactgttttctcaagaccctaaatattttttaagaagatgatttataatggctatgcagcagccatatacaatttaacacataccttaatattcaagttttaggttttcagttttttcatattataaataatgcttcaatgagtatgttggtcagcacatttttgtgggtatctctaattagttccataggatacattcccagaagtgaaattactgagggaaatgaaatgaacatccttaaggctcttaatgcatatcacccactcctccaactcacattaaagttcttttaaaagaaatcagaacagtggcacctaaaggcatattttataactcccactaacattaaacaagtacccttttccttacacatactccttcagattcctagaagttaaacttctaatcccctttctgccatcccaccccatttgtatacagctctgggaagaatatgatcagtatttctttactttaaaagattactcatcatatagccttcttagatttcttctagtcttttctcctttcttcaagaggaggaagctttttaatttcaaactcaactctgagaccatctttttgatatagacctaaagttatgagcacttctagaatgaaacaatcctgggttcaattataatcccaggcttttactaattgtatgaactttgggcacatgatttaactctgcttctcccctataaaaagggataaagctagcttacctcttagggctgttctgaggattacatgagacaatactatacagcgtgaaatacttattcttagtatacagcttattatagtaaataatagagacaaggtaatattattataatgaatttttctgaagccctatttgcatctgaaataaaacgaattagctaatctgaaaacaggcagcactaagatgacacaatgtatcaaaatcttgatttcgaaagaaagaaatcaagtgttttctcctacttaatttaacacattaccaaaaaaagccacatgataaaacacaagaaaacatcttttcaaaatacagtcacttttaaaagttttacaaacctctcttataatttctctggtaaattctgagaatatgccatctctatcattcacattaccccaaccaaaatctctctccagtaagtctcatacattacttaaagtcaaatttaagctaatgattatctctttctgaattactgatagaagaaattgggaaacacaagtcttccttgccctcaaatattaaacaaaaccagattattaaaggagcctattattaacaatattaccagcatacaatataaacatgtatccttcaaggttttaatagagatctatttactttacagaatttttttcttttttaatgtattattattattattattattattattatttttgagacagtcttgctctgtcgcccaggctggagtgcagtggcaccatctcggctcactgcaacttctgtctcccaggttcgagtgattctcatgcctcagcctcctgagtagctgggattacaggtgcccaccaccatgcccggctaatttttttttgtatttttaatagaaacagggtttcaccatgttggctaggctggtctcgaactcccggcctcaagagatctgcccaaacggggccgggcgtggtggctcatgcctgtaatcccagcattttggcaggccaagctgggcagatcacttgaggccaggagtttgagaccagctggccaaaatggtgaaaccctgtctctactaaaatacaaaaattaggcaggcttggtggtgcacacagcgagactctgtctcaaaataataataataatagtttaagggaaatatagtgatcatttaaaaaattaattatatctaggatccatatgcacacagaattatctgaggtattccataaatcatgctcagagatgtaataggagttgtatttaatattgaacagcaggaatgatcaactgttgtaaagggctaataataataattcaaatcaaaacagaagatttaaaaaactgtaatttaaaaattataattgctagcctattattagtcaactgttgaaaaatcagctttaaataaccaaaaagaaataaacacaaacatattcacagaggggtctttcaaaaggtccattcagtgttggctggttaatcatatcataaatataagatctgagtaccctggctggtactaacaggcatggaaacatggatatacaaatggggaaacaagaaaatttgtttcccatttcatatgaagttatcaaccccactattattaaacataattcccaattcttatttctagcagttaccaggagccaaagaattctaacaagcctaaaagtaagaaagctgccaatatcataaaagagtagccaaacaggtcaggagaaacaggaatgcagaaactagatgcaggtacattaatacatccagaatctgtgtggtcatctgtctggaaaatttttctaattcgtagcttgattaaataaagcctatagaaatataattttgttacatattacatatttttaaataatatagtattcttttaattttctggcacccatttcaggaaagcagggaaggagcaatgaagcacactgcatttacacacatagaaaaataagcacagatattaagtgcccaaagaaccttaaagtgacttctgataaaycattttaatttatagttcatgtccaagacacctaaaaccaatgaaaataactccctaggcacataaggttataagaaaattggggatttccggtattctaaaatgactttttggttcagcagaacaatatctgatcagttttgggtggggttaggggagaaaggagagggagaagttggcaaaaaaaaccccacagagcaaactatgatacatattcagactacctggtgttagcaagaaattggccacctcgaaatatatttattatgctttcctaatgatagtaccatactacattgtatataaagtaagtcaaatcaatagcaaatcctcaaagaatttaccaaacacttaaagattccaagcttcagggtcaagacttagtacatacaaaatagctaaatgagtactgaaaaactatgatttttttattacatgcatcaaacatactgttgcaaagttgcatacccaaccacatatgtaactaagtgctttgtaaagaatgatgcatggctgatcaaagtttctgcggaataaaatcaacattcttagaaattgtttacaatacagtgccttaccaaaaggaggtagtccatacgtttgggttgcctgagggtagacagcatagggttgagtctgctgtagtgtctggtattgagtctgtccagggtaagcagtttccgaaacaggaactgagagaatatgtgcataaggtctggaaaatttcatgaaaacaaaaacttttgtgtgayttactttagtaacgaaaaataggtaaaatagctaccaccactaacagcaaagaatctgcaacaaggagactaatcttccacataaaatggctcttttcaaaaattttttatttttgagacagagtcttgctctgtcgcccaggctggagtgcagtggcatgatctcaactcattgcagcctctgcctccccggttcaagcaattcttctgcctcagcctcccaaatacctgggattacaggcacccaccaccatgcctggctaatttttgtatttttagtagagacggtgtttcaccatgttggccaggctggcctcgaactcccgacctcaagtgatccacccaccttggcctcccaaactgctgggattacaggcgtgagccactgcgcccggcctaaaatggctcttatgatcagaaagtagaagtctttcctcctttctacgttctcctatcatcaacccaaggaacaattttatgaaaaatttaatagttccaaacatccctccaagttccaattatcctacaaacatttctagtgtgctacatgcatggccctatgtgagacacaaggatggattaaacttattcatgctcttatgcctacatctagaataaaatcctaatataatagaaaactaagagaacaagattggcaattggctctcattctccaccctgccccttgaaccaaactaaagttctgagagggaaagtgagactggaaaagcgggtgaggctggtggagaaaaggcaagcaaacacatcaaaaaacggaagtagagatgggttccaatatcctcaaatcaagtctacaaaacagaacccaggtaagtaacaaaatctgggaagttccagacaggactcaatctcctcaatgatatttaagtcagggcatactgccactagttggtgccaccatatcagggatagctagagatttcagcagtgaaactcctgggactttacactagctagcagatataattgtttcatccatgatattgcactgaatttttagataccaattatctcatttggtgagttacactgtatatataagtaaaaaagaaaatgctatttgtaccatgtaagcataataaaatatagcagggggtgttttaaaggggaaattttttttttcacctttgggggaagaggaaaatgaagaaaggccataaagaagtgatatactagctgagcagataagaggcacagaactgggagagaaagggtgttctaggacaagaaaaaagtcctggagggtatagagtaaggaaagcaagggcttcggcctgcaaagagcacagataactgagggaagtatattaagagaagtagcgagagaaaggaagcaaagaccttgaatgccaggctaaaaggcaaatctgaaactgagagccactgaaattattgagcaaagagtgacaagatcagagctgttctttaataaagattattttgacactgctttgtaaaatggtttagaaagggaggagaaactggaaatggagatccagttaaaaaacagttcagataagtaataaagaggtctgaattaagatagaataattaagatagctaataaggaattctgaatgtagcaggtatgcaaatactttctgaatgaataaatgaatttggaatctgcaacatattaacatctcagtacattctaaaaaactgaatttaaaaataactattcttcttagccagatctgagtccaggaaatagctcaggttagagttgttactcaagtcacatgggaatgatttaaatcttagtgaccttaaatggattaatctccagatatggtaaagaccataatgtcctttttcatgcagagtctttgtagcccaaagctcaaatgtgttttcacatttagtatctaatttcttcataataatctcagagaataggttcagtyatttcacagaagaaagtcacatgaaaatgattagcccaaggacaccattagtgttaataccagattaaaaattagaagaactcattgggttgactttttaattagtttattttttaaytaatgaaaattcaaaaggtaaaaacagatataaccagggaaaagaaagacagtttcctttttataacagccccataaagtatctcttgcttttgttaccaatttctttatgtatccagcagctgtaagcacataagcacatatcctggcttaataaatgcacttgtatgtgtctttgtatgcataggtccactctttattacgcacaataggtagcttggtatacacactgttctgcacctacccactttggagatgaaaaacctggctgatattaatgctgatcttaccccatgaaggcccaaaacataacctcttagtgacttaacccaccaaacctgtctaacttcaagcccggttctactctgaggacattcctcaatcaagaaactgaacacaggctgggcgtgatggctcacgactgtaatcccagcactttgcgaggtaggcagatcacctgaggtcagccgtttgaaaacagcctggtcaacatggtgaaatcccatctctactaaaaaatacaaaaattagctgggcgtggtggcatgcctgtagtcccagctatccgggaggctgaggcaggagaatcacttgaacccgggaggtggaggttgcagtgagccaagatcgtgccactgcactccagcctgggcaacaaacagagtgagattctatcttaaaaaaaaaaaaaaaaaaaaaaaaaaaaaaaaaaaaccgaacacagattggactgagaaattcagtcttgtttttattaatctgtatgctatatgtcaaggtacaggacagagaaaatgatcagaggtcaatcaatgatatggttgatcactaacactattttgcatgttcagtgcctactcattttagagtaagcttttgtgtaaaatgatccattgcagacaccatctrctttttaaaaggatactacatagactatatttagagggaattaaaaattggaatgacgatagaataagagaggtaaaaataatttaaatatctattattttagaggaaaaataatattaaattttgcaatgaatctacagaaaaagcatatgcattttggaaataattattcaacttactttgcagaatacatttgtgaggtataatcattggatgagcgagggatgtaatcggtgcatgtcataactgaaagaaagataatatcaccaggttaaaaagttagaacatttcgaaaatggaatgggaaaactgcacatctcactgtatagtctttcaaactaattaacagaatacagcttggacaccagatagaaagactatgtggtagaaaatatctcacttttttgtttatacatgtgtttatagacttccagaggcagttaaaaaaagaagggtggggtatggaaaagagctgaaggttggtaaggatctctacctttacccattactgatctaaaataatagatgaagcaaccttctaagctttcggctatgctgataggcaaacttaaaaagcaagctttatgtctggaaaaccacattattctacttcagcttatttgttctttgagtgcttactatattgagtaaaagccttaagaatgacttgcaggaaaacagatttgggggaggcacccaatcttattttaaaaccactgctactgctatgcataatcaacagcagaatagatgcaagtatgcttctatactattattttttctgttttgtagtgaaggctttaagtttggcaaatcacagacagacgtgaggaactgatgtgatactctgatgaactctcaaagacttttccagctattgtcctcttgacccccatgayttcatctggaatagctgctatgaaggcttgactctcatgattactacttctggtatgaacgctgtaaatatctgattaaaagtgaaccaattaactttatgtctaattaggttccctggaagagtacctgacccaaaaagagaaccttgatcaaaagtagatgaggggccaactcaaatgctcaagagtaagacaaatcaacacctgtgagtttattacagaagagcttgtccaatgctattgtttgaggtatttaaaaataattattggagatcacattcacctctaatcattttgacaaaaatgaagatgtcaattagatctaaagttttgacaatccattgcaaagaatgtaaggtaagtttatttgaattctacataatggttctcagttgacacatatattaaaaaacccaaacccttatcttcctccaatttaatttaattctggaaggaatcaacaacatcctaggagactgaggccaattttcacttctctagagaatgaatgagacttgatcttcacagtacttgggaaccacaaaatgattataaagagtcaagatataatatccattatactatagaagaatcaagtaagtaatatgctggcttggactagaatagcaacagtggggatgaggcaaagactttgaaatatattctgaaggtaaaactaacaggacattctgatggatttgatgtagagaatgaggaaaacaactagacggagagtgataccacttcctaagatgggcaagtttgggagaagagtgtatgtcacgggggctaaaggaatcgaaagttcttttttgaagatcttaggtatgattttccttccagtaaagatgtcaaacaggcagtctgatacacaaatgaaatcaggggagaagtcagactggaaatatcaatatggaattcattaaccatgtacaagatatttaaagtaatgtaatggatcggagaatcccaaaagaggaaacatggtagcctagaattaagccctgaggcccaccaaagaagggccatcaaaggagaaaggtgggaggaaaagtactgagagggagaatgtgaggagaaacgtattctagaatttgcaacatgaaaataactaatggccttgacgacagcagtttcactggaagagtgaggatagaagctaaatttgagaggctggaaaagtgaatgggaggtgaaaaagcaagtgagggcaactcttgcagaagttctgatatgtcacagaacaaagagaaggtccataactagtaagagatgtggagccaaggscggaggggcaggggggggtcgggggagcagtgtttatgttttaaaatggtaagatgtttctttactgacaggaaggataaaaagggaagaccgtgatgacacacaagtggtggcaagaaaactatagtaccaaagtccttggggaaggtaaaaacagatagcatatgaaacacaaataatagcctctatatctgacaagagcaagtatgctgcttacatcctgacaagaaggaaatggctgggtgtggtggctcatgcctgtaatcccagcactttgggaggctgaggccggcagatcacttgaggtcaagagttcgagaccagcctggccaacatggtgaaaccccatctctactaaaaatacaaaaattagccaggcgtgatggtgcgtgcctgtaattccagctattcggaaggctgagtcaggaaaatggcttgaacctgggaggcagaggttgcagtgagcggagatcttgccattgcattccagcctgggtgacaagagcgaaactccacctctaaaaaatacaaacaaacaacaacaaaaaaatacaaaaaatagctgggcatggtggcatgcgcctgtaatcccagctactcgggaggctgaggcaggagaatcacttgaacccgggaggcggaggttgtagtgagtcgagattgtgccactgcactccaacctgggcaacaaagcaagactccatctcaaaaaacataaaaaaaaaaataaagaacagaatgaataggatgacagtctaaagtaaaaatagaaaggtaggggaaggtatagatgtagacttcaaatgaaccaaagtttttatttattttattttattttattttttgtagcgaggaggtctcactttgttgcccaggctgatctcaaactcctggcctcaggtgatcctcctgcctcagactcccaaagtgttgggattacagacaagatccaccatgcccagttgaaccaaagtatttgaaggaaaaaaggaaattatttggaaggagcaagaatactcaacttacttcctgaccctgaagtatgtaaagtataagattttagggaacaggtctttttcttggggatgagtgggaaattcaagaaattagaggagacactttacaaattagagtggttttccacaaaatggacagtttcccaatggaccagaatcacctggctaacttgtcaaaaatgcagattccctatccacatcagatctactgaatgataatctttggaggtgaaactagaattctacattacaaacaagtattctagatgattcttatgtaggctaaaggtctgagaaccaccagaatagaatcacctttgaggaaacactatatagaactcaagacacaccttttaaaaaaaagttacacctttttaaaaaatatacatgggaagtatatatggttaagtatagttgtctctgattttctgtaagacactattacctttaaaacatccaatctcaaaacaaaaataaaatcacggcgtgtgactccttgggtgagtggactccatgtgatcttttctcagctggtctgtcaataaagcttacaggagggctcaaggataaacacacacaaaaacaaggatgggagagccttcaggatattttgggacaaacaaggcaattacgaaaaaccaactctataagaaaagcattactagttataggaatatctgttcaatcatgcacagaatatggtacttactttcctctgacatgggaaggtttgaagcaaggcttgatgtttcaggcttctgatcactgacatctggattgcttacttgactgggagaaccaaaatgaatacattagcccctgattgatttgctgcattgctaaaaagtgatgagttcaaacccatttcctcctaggctatataagtaagaggcaaagtaaatcttcrtgatatccttattgttgatttttaacaactacttgaagagagctcgggccagggctagtaccctcagcattctaccgctctttcttttttttttgagatggagtctcactctgtcacccaggctcgagtgcagtggcacgatctcggctcactgcaacctccgcctcctgggttcaagcaattctcctgcctcagcctcctgagtagctgggattacaggtgcatgccaccatgcccagctaatttttgtatttttagtagagacggggtttcaccatgttggtcaggctggtcttgaactcctgaccttgtgatccacccacctcagcctcccaaagtgctgggattacaggtgtgagccaccacgcccagtctactgttctttcttatatctctagatccctttagtttttatataattcagaaattccagctaagtcactggcaagtcagatttttctttaacaccatatggtaaaacattgctctgccactttttattatatgtttatggggtacaatgtgatgttttgatatataaaacaccttttgcttttttgtgaaaaaaaaaaaaaaaamgtgaaaacacttaagttctatgcttttagcaattctgaaatatacaatgctatattatttattacagtcaccattctgtgcaacagtgctctgttaccttgctcccaaagtaccacaggaaggtagggagacgtttgatttcagacagtggttcttgatcagctacaaaccataatcatatgagaagtgttttcaaattacacgtttgggccaggtgcggtggcttacacctgtaatcccagcactttgggaagctgaggcgggcggatcacttgagatcaggagtttgagaccagcctgaccaacatggtaaaaccccgtctctactaaaaatacaaaaattagccaggcgttgtggtgcacgcctgtagtcccagctactcaggaggctgaggcctgagaattacctgaactcaggaggcagaagttgcagtgattggagatggcactactgcactcctgcctaggcgacacagtgagactctgtctcaaaaacaaaacaaacaaacaaacaaacaaacaaaaattatacgtttgtttccaagcgggggttctaaacccttaagattcattctactatatttctcttatctcccagttaaataaaacacaaacacctcattttctatttgttatatagccaggactaagcaacatcattttttttaacttataaggaaaattaagagaaattgagaatgataagtcacataaactgggaggacaagtcattatgttagatagtttaatgctggggagattccacagaaattctggaatgaagattgttctaactttcattcttcaaaatgttctctcttttccatctcctctacttttcattcttcagttattatgtcccattatagcacagtggttaggagtgttgattctagagtcagaggctgctcaagttcatattctattctgccaataactagccctatgaccttggacaagtcactgaacttatctgttccccgctttctacatccgtcaacgagaataaaaatgaaacctacctcatagggctgtcaggaggactaataagtttacatttagagcaaagctagaacacagtaagcacactttaactgtaactgttattatattacaacttcttcaaagcccaggcatcattcctacattcatgcaccctagaaagaagcttgctttgttcttctactctctagggagaggtggaagacactgtaccagaggttctatatatctggaaagataatgctgactaatcaaaggtaagagtagtttctacacagcaaaattgtaaaaagaaatgttgcttatataaaaaatatatagcacaaaatttataaagttctcgtatcatttctgaaactgacttctaatattcaagtataataagggttttttttaaatggtatatattttttgtttggttggtttttgttttgtttttttgagtcagggtctcactcggtcacccaggctggagtgcagtggctcgatcatggctcctgcagctttgacctcccgggctcaagtgatcttcctacctcatcctccgaagtagctgggactacaggcatgtgccacaacacccagctaatttttgtaatttttgtagagatagggtttcatcatgttgcccaagctggtctcaaactcctggtctcaagcaatccgtccacctcagcatccaaagtgctggaattacaggtgtgagccacagtgtccagctttaatggtatattttgaatgttcaaataatttttcctcatttgtaattaattttaaagctaaatccccaagtaaggttcatttttatcttgttactcaaatgtttatatttttgtaatagaacttaatgtactaagatgtgattatggaaattgaagggtaagggcaagaaattatatggaatagttgtgtcagtttcccaaactgggtgatttattataattacctgaatagttaataaaaatagacttctggaccccatctcacacctacttacatagaattaccaggggaagggcataaaactgaaccagaattttcctgacatcaataactagtttgacttctacatgtacctggttaagtatgaggttcactgttatacccactgttgaagactatttgtagatcytatattttagaagttggtgatattgctatgatccagtatccactggaccagttcctaaaacccaatggtcctagaatattatgttatagcaacatcccctacatactcaactgagcatctagagaataaatagaaacaacagcaccaagacagtgagttaactctagcacttgttaaatatttaaattattatccttagagaaatgacatactgcctcaaaatataattattttcaaagttatataaacataaattttgcttaacaatgaatacaccatgaaaaaacaactgctctaaaataaaatgaccaaaaaaacccaacaacatccaagtccataaagtggcacaacaaatacctccttctcattcaacagaactattaacaacacaaacaacagatgaatggataamgaaaatgcggaacagacatamaatggagtattattgagccttaaaaagaggaaattctgacacatgctacaaatggatagaccttaaagacatcatgatgaatcacaaaaggacaaatactgtatgactccatttctgtgaggtacttagagcagtcacaatcatgcagacagaaagtagaatggtggttgccaggagctggagatgggggagtggagaatattgtttagtgaacatggaatttcagtttggaaagatgaataaagttctagagatgaatggtagtgatggttgcaagacaaagtgattgtacttagtgccactaaactgtacacttaaaatggtaaattgtatattgtgtgtattttatcatagtaaaaaaattgctgaaggtaaaagaagagataattgcaggaaaagatgaaggtgatgggttctttcaaacaactggagaggttagccttcgataagagcaagggaatttcagaggaaagataaacaatatccaagagaagcagattaagtaggttgatttggtgagagaagggagatgttcctaatctctctttgaactagggagcaagatccacagctgagtgaatggaaatagcaggaaagggagggaaaagggagaaggtagggggcaaggagggagggaataaaggaattaagatgattttagaggctgggaaatcagacataccaggaagggggactaagtgcctgttttagatcttatcatgaatagaaactaggaacagttagcacaattttgtgtttttctctcacgatgtacaagtgattgggaataagtacagaataggtggatagttgggtttaatcagggttgtggttttgctaggcaagtatgacagaaaaaagtgaggaagttaagaatgtttgtaagggactaattacagtagatcttatagttaagtttatttttctttctttttttttttttaaatgagacagcatcttgctctgccaccaacccaggatggagttcagtggcgcaatcttggctcaccacaacttctggcccctgggctcaagcaatcctcctgcctcagccccgagtagctgggactaaaggtgtgcaccaccattcctggataattgtttttgtgttttttatagagacagcatcttgctatgtcgcccaggctggtctcaaactactgaactcaagcgatctgcccacctggacctccaaaagtggagccaccacacctggccagttaagttcctttttttttttgagacagagtctttgtcgcccaggctggagtgcagtggcgcattcttggctcactgtaacctccgcctcgtgggttcaagccattctcctgcctcagtctcccaagtagctgggattataggctcaagtcaccacgccgagctaatttttgtgtttttagtagaaacaaggttccgccatgttggtctcttataaggaagaaactaaagttctttttaaggggtgatggtgaaaagatgacagatgatttaattgatagtttaagacatcatatggctagcatggcagttctagaataaatgagccgggatgatagtgtgtggaggtaaaagtgtaggattcttgaaattaatgtggtagaggtgatgcagttactggctcatatggttggtgcacaaacgacagaaggtaagaactgtggaaaactgaaaaccatggtatgaagaagccaaactgtgaggtgcaaacaagctgcctcttttctctttttttttttttttttgagacagagtctcgctctgtcgcccaggctggagtgcagtggcgcgatctcagctcaccgcaagctccacctcccaggttcacaccattctcctgcctcagcctcctgagtagctgggaccacaggcgcccgccaacacgcccggttaataattttgtatttttagtagagacggggtttcaccgtgttagccaggatggtctcgatctcctgacctcgtgatctgcccgcctcagcctcccaaagtgctgggattacaggcgtgagcgaccgtgccaggcgcaagcttcctcttttctataagaggagtggggttaatgactaagtcatttcataaccatttggtaattaataccaaatctcttggattttatttatttcgcttatgcttcctattctgtatattgtacgtctgactgaagaatatggtgcttttcatctttaccattaagtctcctctatgtagcacagtgcctgatatacaacatgagtttggtacatattgttgaataaataatgaatgcataagaacaaatcagtgcacaagtttcaggaaaaaactatttggaaaggaaattttaatcttaaaccaaataatttcaaaatgtaacagctgatggtaagaaccaaaaagagggcaaagcatgcccatacgctaatcagcatgtgaaaaaaaaaaacaaaacttatgagtagttcattaaaaagaaagcaaactttacataccttatagtttgctctcctgattcctgcatcttggcttttttcacctgcaaaaataaatatacaaaggtatcaatgtacttgatctgttttttaaatcatttagctactcaaacaacaggctattaactattacaggataactgtttaattttgtttagtctagatttaattaacccttgttatattttagagctagaaatgaagtttgttttttaaatggagctcttctttttaatgaaaaaagtgttcttctgattaaaaaaaaactgtttaccagaatttttactcaaggtagacagaatgtttactaggataaagtatccaagctttgatacaaactagttggttttatactgtaacaggcaaattatatttaaacaaacagtaaagatgggaatctaagtatcatctactcatttatttaacaaaaatggctttatacttaagttagtttagtgtcaaaaattaatatgaattcttatcaggttaccagtaatttagaaaatattgttaaccctgtattttttcttttcatatttcacattttctatttccttctggggagaaggcacttccattgaaacagtgtaagaatccacaaatgaaagataatggttaatactaatggatttttctgttttcatattacagagaatctgattttagaactctctggttagaactggttgtagtagaaacatgtctaatatgcttagccattcaaattatgaatatttaaaagtatttcaagctaatagaagaaggcagaaactctcctagataatttgaagcaagcgtatcaggtggaatcatagatatttaatattacattgactatttcagacaaggtaaataatacaggcaagccccataaaatttgtcgtggccatatactcctcatgagaatacacaaccatgaccagacattcttggttccttgcttatggcatgtcaaaatgtgttccattcaatgttctcttaattttcatagttaccaaaaaggagaaaataaagaaacaaaggcaatttaaaaaaacatttctaaatttgaaacaaaaattacattaaagcatttgaagcaaaaacaaaaaacraaaccttgaggtgggcaaatcctgattaagcatgacattaaatccaaaagccataaaggagaaaatagatatgattacacaaaaattttaaacttctatatgataaaagacaccataaaacaaccaggaggttgagggattccaggatagtatgcagactgtgacaaaaaaatctaactgtattaccaatgtatacgactatctcactgaaagaggtgagggaaatatgatctgacctagataatataggaaaacagtgttttgcctggaaactataaggctaaagacaagaaaaattcaactatctagtttatctgcctgccataatttcacaaatgacaaaatatagcctttttttataaaatgttctgcccttcctacctaaagatgatagtagttacatatggtcagataataatatattcttccaatagtggagatgaatttatgcttagctcatccaaagactctttgctatcaaagaaatgtaattacgagctggttggctgagtaaccaaaacagtctatactcttcaaacagtaatttaaacaaagaaaattagagcactgaggagtctaacttatcatagtcttcattttattagaggtatagagcaacaaatttagttaatcaactccaaaagaaaaaaggatttaaaaaaaaggtcctggagcaacatttttaaatttactttttatttattattattattattattattattwttttttttgagacagggtcttgttctgtcacccaggctggagtgccatggcgtaatctcggctcactgaaacctctgtctcccgggttcaagcagttcttgtgcctcagcctctcgagtagcagggaccacaggtgcacaccaccatgcccagctaattttgctattttttctrtttttaggagagaccgggtttcaccacattggccaggatggtttcgaactcctggcctcaagtgatccgtccaccttggtctcccaaagtgctgggattacaggcgtgagccactgcgcctggccaaaaatttatttactttcaaggaagaattatgcttctttaygctccttcatttttaatttattaccgtgccaacccagtgcagagtatatattcataaatagaaagggagaaaatgtatctaaagtcatatctaccaagcagaaaagtctggggaaggaaagggtgttacaatgttttttttgttttgttttgtttttaacctcatatggcccattgtttgtcttgatttgagcaattatgcccccctctaaggcagggataggaagcatgtactaactaggcagtagaggcaggtaaattaactaaagaagacagacagattttactcaattatagaagtatcagttcaaacaatacaagctagaaactgacagaaaatgattcctggttgttaagagaaatagcaaagattgagcaacaattttctggagagtttacagagtaacatagtacttgcaataatgaatactgaaaactacacagcaaagtgagcaaagattcaagtagcaaccagtcctacagagaacaattttcattaacaaaaccagtatagattatacaagcagctggtatccaaggaattggggccataccaggacagtagtaggacagtaatacaagctgccaggaagtaagaaagcaataaagctgaaaaagctccgttagggttaaaagtgaaaaaatcagaatctctttttgcrtgacataattttgtatacagaaatcctaacgaatccattaagaaaccactagaactgataaacaagttcagcaaggcagcaaaatacaagacaaacatacaaaaatcaattatatttctatatacttgcagtgaacaattcaaaaatgaaaaaaaaaatccattcacaatagcatcaaaaggaataaaatacttaggaatatggccgggtccagtggctcacgcttctaatcccagcactttgggaggccaaggcaggtggatcacctgaggtcaggagtccgagaccaggctggccaacatggtgaaaccccatctctactaaaatacaaaaattagctgtgtgtggtggtgcacgcctataatctcagctactcaggaggctgaggcaggagaatcgtctgaacctgggaggtggaggtcgcagtaagctgagattgcaccactgcactccagcctgggtgacaaggcaagactctgtctaaaacaaacaaacaaacaaaaaaacttaggaataaacctaacagaagaagaagtacaatacacgttaaaagaaatttaagaagagctaaataaatgcaaagacaccccatatccagggaaagaagaattcatcttgtaaagatggtaatactccccaaattggtctacagtcaatccaatcaaaatcccagctggctgcattaaagaaattcacaaattgatcttaaatttcatatggaaatgaaagtgacccagaatagctaaaacaatcttgaaaaaaaaaaaaaagaacaaagttagaggactcacatttttccatttcttttttatttttattttttaagacagaggctcactctgtcaccctggctggagtgcagtggtgcgatctcggctcactgcaacctccacctcctgggttcaagcatttctcacgccttggcctcccgagtagctgggactacaggtgcgtgccaccatgcctggctaatttttttgtatgtttaacggagatggggtttcaccatgttggccaggctggtctcagatctcaggtgatctgcccacctcggcctcccaaattgctgggattacaggcatgagccactgcgcccagccccatttttcaatttcaaaacttactataaagctagagtaatcaagaccgtgtggtactggcataaggatggatatatggatcactggaacagaattgagagtcctgaaatagacctctacatttgttgggtcaactgattttcaagaagggtaccacatttacagtcaaattattttcagcaaaagtgccacgatgattcaacgaaggaagaatagtcttttcaacaaataaagctgaactcgtacctcaagccatatgcaaaaattaactgaaaatggatcaaagcactaaatgtaaaagctaaagctataaaactcttaggagaatatgtatgctctcatcacttgtaaaaatataggccggaggcagtggctcacacctgtaatcccaacactttgggaggctgaggcaggtggatcacgaggtcaggagttcaagaccagcctggccaagatggtgaaaccccatctctactaaaaatacaaaaattagccaggtgtggtggcaggcgcctgtaatcccagctacttgggaggctgaggcagggaactacctgaacccgggaggtggaggttgcagtgagccgagatagtgacactgcactccagcctgggcaacagagtgaggattgcttaaggtcaggagtctgagaccagctgggcaacagagtaagaccccatctcgacaaaaaatttaaaaaacaattgggtgtggtggctcacacctgtaatcctaggtactcaggagggtgagatgggaggattgtttgagcccaggagttcaaggatgcagtgagccacgattgtgccactgtactccagtctgggtgacaaaatgagaccccgtctcaaaaaaaaaaaaaaaaaaaaaaaacagaaaaagaaaaaaggaagatgccttaaaatttattctggtaatggttacaaaaccattttagaatagactaaaaactactgcactgtatacgctaaaagggtgaattgtaggatatgtaaattacatgtcaataaagctggtatcttaaaaaatgacataatcctatgggcatataatggctaatgataacacaaaaagaaagaagcactgacaaattcataaatcagcattctatttttgcttctgctacaatgtataatcacactttaaatataacacagcaaggaaacaaaaaacccagtatacaaattcagaatatccaggctcaaggctaagttctgagagttaattcactgcgtgtcttttctgtatctgtttcttcacctgtaaaaaagaagatacaactacctacttcatagggctcatgtttcaacagcaggaaacagcagcattaacagtacaaggatgctggctgaataaacttaaggatgtgcactgttaacataatatgtaaagatgaaatttaaacaggaaaagagtgaactgcttatgaaaaacaaagcgctatgtaattgttaaattttagtgttattaccatagacagcaagaacaaagttgaatcccagaaatttcaagacaggcttaagaaacaggactctctagttaagaaaattgtattaagcatctcaaatgtcattctgaaattactctgtgatgacttacaagtaatggctatgaaggtttaaacaagaggcaaaagcatgctagtgctaggtaaattgtaatcttggcaataataaatataatggtagggtaaaagtcgtcatggagactataaaaaggatgtttatgtcaagatttatccaacactgtccaacaaacagaaggacactgttctgtttactaaaaagtcatattccatatgctagaggggtaaagggtttgatcataacctagatgaaatttcacacaaaaaacaatttaatgccattttcattgactgtgcttactaatagctatctaattattaatttgacttcaagaacttaacataaggaaagcaggacctagagagggaggtaagcattccaaattattagagaggtaaatatttatggcagagacaacttcctgttctaccactgcatgttaggtgtgacttctgatggaggcaaaaaaatctttttgtcttctctatcaagaagagtaatctacaaaatgtaaacaatagcatacctaaatttttcaaaaagagtttattcccatatttataagcaagcacctcaattattttaaataagttctaaccctccagattcacagaagctttatcccatagacctgtaacttaacaaacatgattgctaaaccagtgtttatcatctctgaaaaatcacagagaataagagaggtgcttgaaacagaatataaagaaatgaggacaaggtgggggacctgcttgagcccaggagttcgagaccagcctgggtaacagggcaaaaccccgtgtctactgaaaatacaaaaaaattagttgggtgtgctggtagtctcagctacttgggaggctgaggtgggagcattgcttcagcctgggaggcggaggctgcagtaagccaagatggcaccactgcactacagcctgggcgacagggtgaaaccctgtctcaaacaaaacaaaaagaaatgtttcactacttggtttgtttgtttgttttaatttaaaggtgatggtagagaggaattagatgctggaaactataaactagtgctaacttaatgctgattgatgacagtgttctaaaacagattactgaacagacctttgtagacacctagaaaggatatgacaatcacctggagctattatatattttctctaagaacactcaacatctttattgatagcttaaaagatttaggctataaataggtaaagtatatgacggaaagctggaaagactaagatttttaattaaggtatcaaagggtgatgatgttacttcttcagggactctcagtgtgtaaactgtagtgtgaggtatttcttattctcaatccactgctgttctttatactctattctccaagtagaggctgtacaataatcagtcaaaaggatcccctcatctgtggataagattcttgcatttttagaaggtgatttatagtaatataacaaagttatttacaactcagttgaagattgataagcaataaagggaaagtgaaagaatctgaagttaaaatttattgcattgtgagttatctaaagaaaatcttttttttttttttttttttttgagacagagtctcacccactctgttgtccaggctggagtgcactggcacaatctcggctcactgcaacctccacctcctgggttcaagcgattctcctgcctcagcttcccaagtagctgggattacaggcaagtgccaccacacctggctaatttttgtatttttagtagagatggggtctccccatgttggccaggctggtctcaaactcctggcctcaagtgatccacccacctccaccacccaaagtgctgggattacaggcatgagccactacgtccagccgatctgaacaaaatcttgaggtagagctagcaattagtggagaaataagagaagggataattcaataaggaagagtcaagaagagacaatgggattaaaataacttcaataataacgaccatcagtaacatctctaggattaaaaatattggctttatcatcaacttgggatgggaccattctttccactcatattttagatctccactacagcctgtgaaaagctttttttttttacctcaaaatgtgtcattactcttcctgttctattttaaacattaataagtattgtgttttcatagattctgtatttgtctgtttgacatccattaattacagagccaaactcaaggccaaacttgttttttatctcccctgagatccagtgcccatactctgaaccacctcctttatctaactctcacacactaagcccctatttctcctgccctaaatcataaatcaacccaggacaaagtaccaccagaaaaccagggatagtccacaggccacaaagcctgaagaattattcaaactagtcaacgctaagctgtttaccctgcctaccttgcttttcctgtggaaacctcattaagtctgtggcccgtgccttcctcccactcttttttgcctcctgaccaacagtggtacttcccccgtgtggcatgctatgcctcttgtttcaaggggaactatgagtaaacactcaacttttctttcagtggcactgatctctccatgtcgtcattcaatcacctttttatattaagatctgggcataaatcaataaggaaataatgccctgtgacaaccatttatagtcagcagaaattttggttttaaagtgcttcaatttcttacctttctctgaagtaataatcaggttttgcacatcatgttacagaagttcaagagaatgacaaggaaatgaagcagggcagaagagatagatgacttgttagcaggtcagcctcacaattctcattaccttaaataggtaaggagtaactaacaatacccatatttcaacagtatgtcaacacttacataagtcttttaaaaatatgactagacctttgtcttaccacattaaaaactcaatggcataatttttcctggtacatatagtatctataattcagctatttgttccagtagtgtaaatcctaaacacactgctcaagataatttttaaccctaccatttccctgataattaaagtcccaccagggatagggatcacatttcaaatgtttcaaaaggtctttttaccagttgctaatgtcttcctagttttatacttacctcaactgagagggctagaagaataatgacaaagtaatcatcaatatgcatttctcaatataaagaaaaatatttaaaatatattaaaggactttatcatttaaatgggagctagtatacctaaagaatacaactagaacacgaaaaacatatcctattatttgctttcaaaattcaaatttttataggttagattttcataaagtaaacatgtaccatgctgtatcctctcttaatatgaaatgtaagaggcccactcaggatagcaaattgaatcggtatttaccaaacttcagagaaagaaactgaagacaaaaggaaaagaccctctagcataaaagttatcttaaaagaatgacactattgcttttgttttttaaatattaagggccaaaaaccaaaaagaagataaacccatatcacctggggacatttaaaattattttattatgttcaatatttaaaagaaattaagaattcaatatagtctctagggttttatctgtttttaagaattagctagtggtcaaattataacttcctcactactactactttttaaaaaattaactctcaaggaaatttaggtaaaaacaaaactaaattttctggtagaaatggtgatatactgtcagatcagtaaagagacgtcctcttttattttctaaaaactgtaacactagccacttatttttttaaatgacatttctaaatgcaatattcatttcgtaatgctaaattttccttagactccttagaattaagttagaaaaatataacattgttttcttgaaaggaaacaaggaatcttttccttatttttatttctaatttggaatctataactgaataataattaaaatctcttaagattagctcttctacaatcaactttaaactgttaaaggaaatacttactggttgctctggtaaatcttgctcttcttccatgaggaccaatatttctttattatacttatgtgactggattgcaagtctctctcagcagttttcacaatctgtttttaaaaaggaggattcaaagctttatacactcttaaagtattatcattgaggccatcagagaatgattttttagtatcttgctaccccaagctttctacgtgagttccaatcacaaaatctcaaacctgcacgtggcttttcaaaaatgacatgctacaccaaatcaagagaggtgtacacaatgacttttataatacc

SEQ ID NO: 96780 - DNA, 16336 bp, Homo sapiens
ggtgggctcgttcgtgttagacgcggtggactcgttcgtgttgtgttagacacggtggactcgttcgtgttagacgcggtggactcgttcgtgttgtgttagacacggtggactcgttcgtgttagacacggtggactcgttcgtgttagacacggtgggttcgttcgtgttagacacggtgggttcgttcgtgttagacgcggtggactccttcgtgttgtgttagacacggtggactcgttcgtgttgtgttagacacggtggactcgttcgtgttgtgttagacacggtggactcgtttgtgttgtgttagacacggtgggctcgttcgtgttagacgcggtgggctcgttcgtgttagacgcggtgggcttgttcgtgttgtgttagacacggctcgttcgtgttgtgttagacacggtggactcgtttgtgttgtgttagacacggtgggctcgttcgtgttagacattgcccattgacttcctcagtggatgtgaggaatgggacctgagacattgctgttccttcgtttcctcccttcagtctcccaatattaaataatatccaagtacattacaatagtatgcaattgtgtagacaagtattgtaaatactattgcatattgtatattattgtattttattgtctatgtaatatatgcgataaaaccccacactaatgggatgcattgggctccaaggatggagcaggatggagcctcagcgtgtaagtcaggacgtctcagcatgtgctggccatgggtttcccggtatttacaacatttggttgaatcagtattccatgattacatgataggatgtaatatatataataatcgtttcaaatagcctgaaggaggatggggaaagttcccaacacagaaaggatgcatgtttgagaagatgggtgtgctacttaccctgatctgattactatatgtatatacacatatagtacatatatgtaaacctacatctatacatacatgtgtatgtacatatacgtgtgtacatacacatatgtgtatatgtatgtatacgtatatatgtatgcatgtgtgtgtgtgtatatatatacatatgtatacaaatacatgtgcataagcgatcccctcctggaattgcttgagcccaggaggtcaagtctgctgtgaggtaagattgcaccactggccgggcacggtggctcatgcctataatcccagcactttgggaggccagggtgggcggatcacaaggtcaggagttcaagaccagcctggtcaacatggtgaaacaccatctctactaaaaataccagaaattagctgggcatggtggcacgtgcctgtaatcctagctactggggaggctgagtcaggagaatcacttgaacccgggaggcggaggttgcagtgagccaagatcacgccactacactccagcctgggcaacagagcaagactccatctcgaggaaaaaaaaaaatgatattgccccattgcactccagactgacaacagagcaagaccctgtctcagaaaacgaagaggaggaggaaaaaaaaagtactaattatctgaaattccaatttaaccaggcatccagtgttttatctggtaaccctcattcttacacacacacacacacacacacacacacacacaaaggcgggatagttgtcattcccactgtaaacataaggaaactgggcagaggccaagcaaccttgtgtagctcacatagcaagaagtgggtgaacccagctcatgtcttgactctgagctcagagagtgacaacttgtcaccagcgcccccatagccaccaccctttgtccaccccaggctccctctgcaccccaacccaagctccggccgcttctctgtccccctcctcctgccgcatcacagcccacctcagcctctttgtaggtttccatgcgacgctgtaccatggctgggagtcttccaggcgccgtgctgagcgccttctgtgcatggactccaagtcgccataatcgtacgggttacccaccattatcagtcccctcttatacatcaggctagtgagacagtatcttatccacagtcctacagctggcaggagtagattcaaaccctagcagcaccaattagtggtaaagagtgtggacttgggaacttacaggagtagagagcacagtggtggttaccggggcggtggggtaaggtttggggagatgttggtcagaggaggacagtttcagttggacaagaggagtatgtcttggagatctactgcacatcatggtgactgtagttaataacaacatattgtacacttgcatatcaccgatagtagattttaaatgttctcaccggccgggcgcgctggctcacacctgtaatcccattttgggaggccaaggtgggcggatcacctgaagtcaggagttcgagagcagcctgaccaacatggtgaaaccctgtctctactaaaaatacaaaaattagcggggcgtagtggcaggagcctgtaatcccagctacttgggaggctgaggcaggagaatcgcttgaacctgggaggtggaggttgcagtgagccaacgtcatgccactgcgctccagtctgggcaacagagtgagactccatgtcaaaaaataaaaataaataaaaataaatgagcgtggaatactactcagccattaaaaggagtgaaataatgtcttttggccaggcacagtggctcacatctgtaatgccagcactctgggaggccgaggtgggtggatcacgaggtcaagagatcaagaccatcctgcccaacatggtgaaaccccatctctactaaaaatacaaaaattagccgggcatggtggcgggtgcctgtagtcccagctactcgggaggctgaggcaggagaatcacttaaacccgggaggtggagtttgcagtaagccgagatcacaccactgcactccagccttggtgagagagcgagattccgtctttaaaaaaaaaaaaaaaaagtcttttgcagcaacttggatggagctggaaggcattattctaagtaaagtaatacaggagtggaaaacaaaaatctgtatattctcacttataagtgagagctaagctgtgggtatgcaaaggcatgcagagtgatgtaatggacttcagagactcagaagggaagggcagaagtggggcagggatgaaaaactacacattaggtacaaggtacactagtcaggtgacaggtgcactaaaatctcagaattcaccagaatataattcatccatgtaaccaagaaccacttgtatcccaaaagctactgaagcaacaagccagatgcagtaacctgtacaggccacacctgtaaccccaacactttgggaggccgaggtgggtggatcgcttgagcccaggagttcaagaccagcctgggcaacatagcggacccccgtaactaaaaaaattacaaaaacaagccaggcatgatggtgtacaactgtagttccagatactcaggaggctgatggggaggcactggttgagcctgggaggttgaggctgcagtgagccatgatcatgccactgccctccagcctgggtgacagaagtgaggccctatctcaaataaaattaaataaataaaagttaaaacaggctgggtgcggtggctcacgcctgtaatcccagcactttgggaggccgaggcgggtggaacctgaagtaaggagcttgagaccagcctggccaacatggtgaaaccccgcccctactaaaaatacaataattagccagacctggtggcagatgcctgtaatcccaactactcgggaggctgaggcaggagaatcacttggacccgggaggcagagtttgcagtgagctgagatcatgccattgcattccagcctgagcgaccgactgagcgagactccatctcaaaaaacaaacaaaaagaaaaaaagaatacatccatggatggataatgaatgagaggttgtttatattcacagttaaccctctcatctccagtaatgcaaccatcttcttcctgcttagccttttggagatgctgtccctttagtggtcaaattctgaagaaatcaggaaataattcattcgacatgcccagcacaagtgaagatcaggcagcagaaatgcattcgacctgccacccatccatcaggagactatttactccactactgtaggggatactgacaaattaaatccatacctagtccagatatcaattccacaattttttttttttttttgagacggagtttcgctcttgttgcccaggccagagtgcaatggtgtgatcttggctcaccgcaacctccacctcccaggttcaagcgattctcctgccttagcctccagagtagctgggattacaggcatgtgccaccacacccggctaattttgtatttttagtagagatggggtttctccatgttggtcaggctggtctcaaactcccgacctcagatggcccacccgcctcggcctcccaaagtgtgtaagccatggcactcagcctttttttttttttttttttttttttttgagatggaggctctctctgttgcccaggctggagtgcaatgcctgacctcagctcactgcaacttctgcctcccagtttcaagcaattctcccacctcagcctcccacgtagctgggattacaagcacccgccatcacgcccggctaatttttgtagagatggggtttcaccatgttgaccaggctggtcttgaactcctgacctcaggtgatccacccacctcggcctcccaaggttgagattacaggcgtgagccactgtgcctggcccacattttttaaaaaaggggcaactgcagtgtagtagaacaaagttgtgaccaatgctaggatactctgttcatttcctgacccagccatgaatacactggaataactcatgcaaaatgccagctcgctggccccccgtttccccacccaacaaatgaaggggctcttacaggttcctttttgtcctgaaattcatcaccaatgcaaatttcttaaaaatcctttgtctggcagtccatgcctgtccttcagcatttcccagatctgaccctcaggactcaccaagacagaagagggcggtcggggatggagacatggttcctcagccctgtcctgagctctgtggccagggagggaagtggtgggagcctggggcacaggctcaggatgtgatgaggatgaagaatgctctcctcccttcctccaccagccccggcctttcctaattgagactcatcgagccgtagccggctcctcagtacagtgacttgcacacaagctccaaggagccgcgcttatctcctctggccagcctggcgttgcaccgtttgtccgcctgctggggcctggtctgtgttcccgtgctcccataaactccctgatgtcactaggaaaatacgcatcaaaaccacagtgagatatgacttcacaccttctggaatggctgtattttttttttttcttttgagacaaagtctcgttctttttgcccaggttggagtgcagtggcgccatctcggcccactacaacctccacctcccaggttcaagcgattctcctgcctcagcctcccaagtggctgggattataggtatgtaccacaccaggctaatttttgtatttttagtagagatggggtttcactgtgttggccaggctggtcttgaactcctgacctcagttgatccacctgcctcggtctcccaaagtgctgggattacaggcatgagccactgcacccgaccggctataattttttttaatggaaaatagcagatattggtgagtatgcagagaaattggactgcgcgtgcattgctggcagggacgtaacatggcgcccctgctgtggaaaacagttccagcagctcctccagaagttaaacgtgggattgccataaaatccagcaattccacttcggggtacacacctaaaagaactgaaaacagggtctctaacatatttgtacacagtgttcatagcagctttattcacaatagccaaaaggtgaaaccacccacatgtccatcaacaacaatggataaacaacatgtggtatatacacacaaggtaatatcaaccagccttaactaaaagaataaaaatcagccaggcacagtggctcacgcctgtaatcccagcactttgggaggccgaggcgggcggatcacctgaggtcaggagtccgagaccagcctggttaacatggtgaaaccccatctctactaaaaatacaaaaattagctgggcgttaaattagccgggcatggtggcaggtgcctgtaatcccagctacttgggagacggaggcatgagaatcgcttgaacctgggaggcagagattgcggtaagccgagatcgcaccactgcactccagcctgggcggcagagtgagactgtctcaaaaataaaaataaggccgggcgtggtggcccatgcctgtaatcctagtactttaggaggctgaggcaggcagattgcctgagctcagsagttcaagaccagcctgggcaacacagtaaaacccccaaaaaatacaaaaaaaaaatagccgggcatggcggcasgcacctgtagtcccagctactccggaggctgagacaggagaatggcttgaacccgggacgcggaagttgcggtgagccgagatcrcgccaytgcactccagcctgggtgacagagcgagattctgtctccaaaaaataaaaaatattataaaagaataaattcagatacatgctacaacgtgatggaccttgaagacattatgctaaaggaaatattccggacttgacagataaatactgcattgtgccgcttatctgaggtatcgagaggagtcaaattcatagagacagggattagaatggtggttgccaaggcctgggaaaagtggggagttactatttaatagggagcgcttaggttgaagatgatgacaaagtctgggggatccatagtggtgatggttacacaacactgtaaatgtatttatatttaatgccattgactgttttttgttttttggttttttgagacrgagtctcactctgtcgmcgaggctggagtgcagtggcgcgatcttggctcaccgcaacctccgcctcccrggttcaagcgattctcctgcctyagcctcctgagtagctggractacaggtgcsygccaccaygcctagttgattttttgtatttttagtagagacggggtttcaccgtgttagccaggatggtctcgatctcctgaccttgtgatttggcctcccaaagtgctgggaatacaggcrtgasccaccgckcccggccagtgccgttgacttgtatgtgcacttacaggtggttaaaatgagamctatcagggtgttgatatctaaaaacctccctgccatcatcttccctacatctctcattcagtgaccatggttgaatgcctgccacctttcaaatattatgtcaggcactcagtattggcagttttatccattataaatgctttaagctgcatagaattttaaacgtgttaataaaagtagttataaatctttaatacataagctggctttaaaattattggtaaaataagattagaaatgtcttaagaattgttggcgtttttgtttgcacttattgaacragtggtttcatgcttatccctgcagaatactatgagatttgtcataagggttataaaactataaacccggctaggcgtggtggctcacgcctgtaatcccaacactctgggaggccgaggcaggcagatcacctgaggtcgggagtttgagaccagcctgaccaacatggagaaacgccatctctactaaaaatacaaaattagctgggtgtggtggcgcatgcctgtaatcccagatactcaggaggctgaggcaggagaatcgcttgaacccgggaggcagaagttgcaatgagccgagattgcgccactgcactccagcctgggcaacaagagtgaaactccatctaaaataaataaaaataaaacatttgttttttgtagagttggggtttcactatgttgcccaggctggtcttgaactcctcctgggctcaagcaatccaccgacctcagcctcccaaagtgctgggattacaagtgtgagccactgtgcctggccctattgggtccttttaaaagatacataaaaaatcaaatgcaacagtgaagtcaatcacccgatggcagaaattggggtgctcctggcatgtggtcggtcgaagccaaggacactgctcagcattctgcagtgcacaggacggccccgcccaggcggagaatgatccggtgacacatrtaggtgggaaggatgcacgaatgatggcgtttaggaagaatattatcacttctttcccgtaagagcaacttagagcaagaaaatggwattcttagggccttctctcttatggaggctccaagccagggttgccatggcagaagatgctgggcttgctttttccttgagagaactgtactcaagatgatgtaamtgtcaccccgggtgccacttgggtgctttggagaagcgctcagacgcgacacgccgtgacgactccgcggcaggcagccggacctgtcctctggcgtgcggttcacgggctgtgtttatccccctggttccttcacagccaccttgggaaatacgttgcctctgaatcacgccaggcaggvtctcastgtgtgtgctgcggggctggaaatcagggtgacactccgctaccgaacagcctgactaggaagccagaaagacgctgccggctttagtttgtcctttgactttccttgatatgaatgaagatagagcacttccacactgcacaacaggaaaagcccagaacgcttcctggagatagcgagggggtgatgcagcggacagctatggctgatgaccccctcacctctgactccccctccctccctgctttctgaacgcacatccatcaccaaccataggttcctgtttggggtttgctggctggaaaaaaaaaaaaaaaaaaaggaaagctggctttctagtaaaaaccacttcctttgctcatttatcaaactcaaaygctaggagggccacctaacatcctccgtcccacgcaatggggtgtttctggagcactccggtktatcagggaccctgtcagttgccatcgcacatgtatatggggccagcccctgtgccaccgaagaggggggatattgaaaacatgttacagccaggagcggtgcccccttggttcaagcagttcttctgcctcagcctccctaatagctgggattacaggcgtgcaccatcacgcctggccactgttatgtagtttttaccacaatttaaaaaaggaaagagtgcctgggtgagtcctacgcacctatwcggagaaccaaaggctttgaggttatcctcggcccacccatctgatgggagtgtttctcaaacttgcttttccgtgatctcccagtaagaaatacctactacacacacacagtctccggtcggcatgcttagggtagtcttccaattccccctcctggtatttacaccctggagtggtccrctcctcttgggctgaacctgtaacttgctcccaagcaagagcacacagcaagctcacgcacrtggttgttggtgtgattctgtttctccagattgtctccattcctccctggcttctccacagggccgctcaccatggcagccggctccatcaccrccagccagcgagagggcaagacaagagggctgacgagggacgctaccatcacagaggtcagttttgtaacctaaccacaagactaacctactgtcacttctgccctatcctactgctagaagccagtcgctacatctcccccacactcaaagggaggtggtcgcacygtggggtccactggaagttgcctaccagactcaggtcatcccaaacacaccctctagccatttggtgtggcatcggaaagaaaactaaggccaggtacggtggctcatgcctgtaatcccaacaatttgggaggccatggcggaagggtcmcttgagcccaggagtttgagaccagcctgggcaacatagcaaatgttatgttgccacctctacaaataattagccaagtgtggtggcatgcacctgtagtcccagatactcaggaggctgaggcaggagaatcacaggtcgaggttgtagtgagctgtgayggcactgcactccagccttggcaacacagtaagacctcgtctctaaaaaagcaaaaagggctgggtgcactggctcacacctataatcccagcactttgggaggccaagacgggtggatcacctgaggtcaggagttcaagataagcctggccaacatggtgataccctgtctttaattagccaggtgtggtggtgggcgcctgtaatcccagctactcgggaggctgaggcatgagaatcgcttgaacatgggagacacaggttgcagtgagctgagatcatgccattgcactccagcctgggcaacagagcgagactaggtggctgttctgtgtactgtgggatattgagtagcatccctggcctccccagtatctcaaatatgaaaacatgttttctatctcgattactgagcttttcggtgcctccttcggttctgcacctaagctaagagccccttcatctcaccctgatctctatccagtttctaacacagcagtcttgtaagatgcccggacttaaacggttatttcctgtgaaacaggtgaaaggggctttcatctctaaaaagtcggaactttttttttttttttgagacggaatcttgctctgtcacccaggctggagggcagtggcatgatctcggctcactgcaagctccgcctcccgggttcacaccattctcctgcctcagcctcccgagtagctgggactacaggcgcccaccaccatgcccagctaattttttgtatttttttagtagaaacagggtttcattgtgttagccaggatggtctcgatctcctgacctcgtgatccaccgcgcccggccaagtctgaacttttgcatggcctgttgccctggtgataaactgatgccttgtttcctaaaaggaataaagccatgagttgcctttgttcagctcatgggcattcacccatgcacagaggaaaaataaaatctacgactcgggtacattttcttcttttttttttcttttaaatgagcaagtttgagagtctgcagtttggactaccatgagaattgataggaaggtgggagtcccaggcaatcccaggtcctgtagcagcagctggtggggttcccactccatgccgtgcagagcctgaactcaggatgacacctgcacctgctctctggctgggctctggcacaggaagccctcagcaaacacccccggcacagccatgccatagccagacaacagctcgctgtaccacaccatcatgggagacagcagttattctgagcatctcactgctgaagaaaccaaggctcagagaggaccatgcatgcacaaggtcccacagggacccaagaatccaccaagtgtcagacaacttgcccatgctcttcacggagcaccttggaaccctccccgacaggcaccgctggctctcctgacgtggcctgcaagtgcacggagccccttcctcctcggccattcccagtttagattcccaggggaagcatcagatggcccctctcccctgctggcagcagagcagacggaaccagccagagcccagggcagtgctcacctgcaggccagtccactgcggccagcaccgccccctagaacctactgcgggcatggcggccgccagtcctgggtctcccggctcaggtagtgccaggaagctgcgggcatggcggacagctgtcctcggtctggaggcgccatcctggctttcaaatctgctccagaggttatctggggaggggctgctccctcacagagggagcctctaagcccaccaggcgggcactttcagcccaaagcctccgggccacctcctcatcctcagcctcgggggccggggccttctgtttgagtccatcgaagtactttccggaaacatccgccagttcctccgccacggccaggtatgtgctgggctgggcggccagctcggggctcttgaccagcagccagaagatgggccctgcaatcagcccacagggcatttagtccacactcgctcagagagaaggaaggaagccccgctccccggtcagggagctccgggtccctggagtcccacagagccctcctctagccctttccccttggctgcctccatctgcagttcccttccctggcactgcccaggcaaatcccaccagaccagggatcagaccaaaagctgcctcccccaaggagccttcctggctttgtccaggaaaatggaagctctcttcctcttggtcagccccagtcctcaccctaccccatttctcctttaataacatcttattaaatgcacctggcaccagcctcaggttaaggatttttttttggccaggcgaggtggctcaggcctgtaatcccagcactttgggaggccgaggcgggcggattacctggggtcgggagttccagaccagcctggccaacatggtgaaaccccatttctactaaaaatacaaaaattaactgggtgtggtggcgggtgcctgtaatcccagctgctcgggaggctggggcaggagaatcccttgaacctgggaggcggaggttgcagtgagctaagatcacaccattgcactccagcctgggtgacaatagcaagacttcgtctcaaaaaaaaaaaaaaaaagggctgggcgtggtgactcacgcctgtaatcccagcactttgggaggctgaggcaggtggatcacctgaggtcaggagttcaagaccagcctggccaacgtgtgaaaccctgtctcaactaaaaataaaaacttagctgggtgtggtggtgggcgcctgcaatctcagctactttgggaggctgagacaggagaatcacttgaaccgaggaggcagaggttggagtgagccaagattgtgccactgcactccagcctgggtgacgagcaaaactccgtctcaaaaaaaaaaagacatttatttatttatttattgagacctggtgtcttgctctgtcacccaggctggagtgcagtggtgtgatctcagctcactgcaacctctgcctcccgggttcaagcgattctcctgcctcagcctcctgagtagctgggactacaggtgcacaccaccacacctggctaatttttgtatttttagtagagacggggtttcaccatggtggccaggctggtctcgaactcctgacctgaggtaatccgcccaccacagcctcccaaagtgctgggattacaggcgtggctattagcctcgccaagttaagattcttgatgccaaccaatcacccactccatgtttttcaggattataaacactagtcataaagcatgaactgcctgggggtggtggctcacacctgtaatcccagcactttgggaggcagttggatcacctgaggtcaggagtttgagactagcctgaccaatatggtgaaaccccacctctagctgggtgtggtggtgtgcacctgtaatcccagctacttggagacaggagaatcgcttgaacctgggaggtggaagttgcagtgagtggagatcatgccattgtactccagcccgggcgacagagcaagacttcatctcaaaaataagtaagtaaagctccaactgtttgttccacctattctctgggcggggtcctgtgctggccctttcaaggaaggtctcgtataacccccccagtgactgtgaggtgagtcctattaaggcctgcactctgcagatgaagaaacaggctcagaggggtaacagctcttccccaggaggtgcagctggtttggggtgaagctggagttaccctgagtacagcctgactccaggcgtcagctccacggcctcttcctctgagacacggttttctcatccgccagcagggctctgcctgcttcccggggctgttagaggctggcaggccaggtcaacggaggaaagggacctgtgctctgtgcctcagaagacgtaggcgaggagcaggcatgaggcctcagggacggtctctgagggagggtcctgggccctgggctgagaaagcaggggtggagggctccacgtggagaccccaggctgggaggggactcaccgagtgtggtgctggagaaggtggagccatggatgcccgtgtgtctgcccagctctgtcctggccacgccggggtgcagggcgttgacagtcacaccagagcctggggaagaaagaaagagaagactgagggaggggtccagcctcacctgggaggctgtggcagcccacacccagctgtggggcttccgggcaccaggctgcttcctgcactcaaaccccatcgtccctcttgctctggaatcttagtgaagtggtcttatcttgcggagcggctctgccacatggctgctgggagccgagctttcctggagggcttcataaacccagaacgctgagcttaccccgggagcctgcatcggtgcgtggcggtgggacctaagatactgtaactctgaccagctcccagtggggctggcaccgctggtccacagaccgtctttcagaagcaaaggcctagcacagatttctcaatctcagcactgtggatgctgtgggttgggaggagtgaggggccatcccgtgcgctgtaggacattgagagcatctgggcctttaccctccagatgcccagagcaatctctccccaagccagctgtgatcactgtgtttccaggcattgacaactgcgggtcaaaactgcccctggttgagactcactggctggagccaaaaggctgagctgcctgcccaacagcagcagggaaggacatctgatccaggcagactagaccacctgggatgaacagacaatcctcagaagaacgatcgattagtgatgtctgcttcaggcaccagaagcgggcagcgtggtccacatgctctacttttgctgactctgttctggatccaccgtttggcctcccatcagcctaggatcatggaaaggccgctctaggctcagagtaaagcaagagggaggccgagcctagcgcccccgtaccttgcagccgccggctcagctccttggtgaagaggacgatggcgagcttgctctggcagtaggcggctttggtgttatacttcctcgtctgccagttcaagtcgtcaaagtctatgtgcccagcaacatgggccagggacgagaggttgatgatccgcgaaggggctgaggctttcagcttgtccagcagcaagtttgtcaagagaaagtgacctggattaaggatgatgaaaaggtcacttttgactcacacctaaaatcccagcactttgggaggacgacgggggaggatcgcttgaacccatggtgcagcccctgcccaggcctcacccaggtggttaacgccaaactgcatctcgaagccgtcctcggtggtccagtgggggcaccgcatcacacccgcgttgttgattagaatgtccactcgctcctcctctggaagagaggggtggaggaggagacatcccggtgaggacagaccccagcctgatgcaccagcagaaacactcctgtgctcccacaacctgtgaatgtggcctgtgccggaaacagggtctgtgccgaagtggccatgtcaggatgcggtcattagggtgagccctaatccaatgactggtgtccttataggaagggaaaacagagacagagacacatggggagaaggccatgtgtggacagaggcaaagaccggagaggcacagctccaaggtgagggtgggccgcccccgctggaagtggaagaggctgggaggattatggcccgtctcacaggtcacagccacagggacaccgcgattcagactgccggcttccggaaccgtgagggaatgcacgtctgagggtgtaagccactgggtttgcagtacattgttacagcagctccaggacactcacacgccctccgcacctccatctaagccttgggactccttcctgccggagccccgaggccaaaaacgggaggttaccggtgggagccccggcaccgcaggcgtggtttcattcccaaacctgccacctcactcatacaagcaaccaaaggacacacagatggagactgcagcctcagtttcctcagctgtaaaatgcgctgaaccacagggccttc

SEQ ID NO: 96781 - DNA, 95506 bp, Homo sapiens
tggcttttaaatgttgtcaattactttacatatgtttacgtatacatataaatatatatgtatattattttattttattttttgatatagagtctcgctctgtcgcccaggctggagtgcagtggcgtgatctcagctcacagggtttcacggtgttagccaggatggtcttgatctcctgacctcgtgatctgcctccctcggcctcccaaagtgctgggattacacgcgtgagccaccgcgcccggcctattttttatttttttggagatggagtacagctctgtcacccaggctggagttcagtggcgcgatcttagctcactgcaacctccacctcccaggttcaagcgattctcctgccttgcctcctgagtagctgggattacaggcatgtgccaccacatctggctaatttttgtatttttggtggagacagggtttcgccatgttggccaggctggtcttgaattccctacctcaggtgatcctcccgcctcggcctcccaaattgctgggattacaggcgtgagccactgcgcctggcctatttaaagtctttcagcagaagtagtaatacgcacagagatgcattttgggaagatgaaatgtgccagtgttatgttctagagctgagttgtccagtatggtagccactggctacatgtggctatttaaacttaaaataaaaaattcagatcctcaattatactagctagatttcaagtgctcaacagccacatatggctagtggttaccttactggacagtgcagatataaaaaatttccatcatcacaaaaagttgttggacagtggagataggagagactgaggcaaaacagccaattggagaccattaatattagtctaggagatgttatcaagtcataaactcctacgaccacagtgaggatggctaggaggagcaggtggaaagttgtctttaaggaactccatcaaatgtctggctaacagcagcaagggtaaacgcatggtttccttattattttttttaagtaattttctttggaatttctccagctccattatgtctttcttgatttcatagaaatcctagtggctcattttcatgtactagcaggacacttcccaagaagatgcaatgaccagaaactcctactgttgagtaggccccacttagcaagacctactgaatcagaaactctgggggccatcagtctgttttaagaagctgtccagactgctgggcccccagagattctgattcagtaggtcttgctaggtagaaaaaaagcaaagaagctgtccaggtgattctgataaaaattaaagtatgactaccactataaatatagtggattatctttcatgagcctttcagtgctaagtttgggggccctgttaaaatacaagcacttttggcctagctctttcaccctccatagtacccttatccatccatccatccatccatccatccatccatccatccatccatccatccatttatctaattatttacattatctgtgttcagagtgctttaaaagtaaagaataggccagacatggctcagtggctcatgcctgtaatcccagcactttggaaggccaaggcggttggatcagctgaggtcaggagttcaagaccagcctggccaacatggtgaaaccccgtctctaataaaaatacaaaaattagccgagcatgatggcgtgcctgtagtcctggctactcaggagggtgaggcaggagaatcgcttgaacctaggaggcagaggttgcagtgaaccgagatcaaaccactgcattccagcctgggcgacagagcaagactctgtctcaaaaaaaaaaaaaaaaaaaaaagtcaagaataaaaagtttaaatacaatccaattttttagctattgacccaaataatatgaaatcttgaaagctagtttagttgcaggaatatcttccccctgatattgttaactttcttatgttttctataatcacggaaaggcaaaatttacttccgaattttcaaaataagcatttgtaattccatcagaaacaaccctacacctgttactacctaggtttttatggagaatgtattgggaatacagaaaaggtataagcaaagagcctggcctttagatcctttagtcactctggctagtggctagggatgactagtaagatgacagtccttaagcggatgaccattggacacataaacataggacaaccaccttccatgcaatgtggatagagtaacatggtgtgttggagagatgctcattattggggtgggggtgctggagaaggcttcacggggcccctgacacatcaacggcatttgacatgaaaagaaaggggcaaggaggtgggggtggggattcagtcacagggaacaaaattaacaaaagcagtggggtctgaaaggaagaggaacggccgggcagtcaggcctcaggaggaaatggatggggtaggcggtggggtgcaggtagcacgtcagttctggggcttttgacaatatagacaggagaatttgaaaggatgcagcttgcaaaacgcacacactgttgtctcttgtcattgccatccacacggcctttgaaagtagagacaatacctcagagataagctcccagggacgaccatcattcattcattccacagatactgactgagtgcccacggcgtgcctggctctgcggcatacctgggtacctgccggtgacggacgcagcccccgccctgggacctgcagcccccggcgcccaggcgtctcccagcagcggctcacctggctccttggcgggggcgggagtgcgggcgctgggatcccacacggctctcgcctggctggcggcgctgcggacgcggataccggcggcggttcccgagccgttgtggcctagcccgcgggcgttccgggcgggctgaggagatgagagtgggggaggggacgaggaagaggagcatgagcagctgggctagggagccaggaaagtggtacctgggtcgccctcctcatacctgagtcgtgggatccccttggtatttggtaaacctgtataccaaggctccttctctctccgaggttttgctattcttgatcgagggcctatttggtgccaggcctcgtgtcctgaacatacagcagtgcacatgtgtcacatgtgtactgcacagacggtaattcactaacgtctccggaagacttaagccttcctcaggtcagaagaggtaaaaagaaatggaggctaggagggtcacccaggtctccaaccataggctgtctgccccacaaacccggctctccccactgaatgacaccctcctgcccagatctgctctggatgcagacatgccatctgcactcactccctttaccctcctcccaccctatccctgtccctagcactgtctctcactccaccttgtattcctgcttggcccagttacagttttacacttgtttgtttgatgactgtgttaatgtctaccttataatgcactttatgtattcctttttgtaaatcatcttacccctatgagggcaaggacttttatccctttcattaactgttttattatcagtgcctacagcagtgtggtggacataggaagtattcaattaatttttgttgaatgattgccctcccattgattgtaagctccacaccggcagcaactgtagtttttaatcacttttaaactgcaagtgtttgacacctagtaggcatttaatacacattggttgaatgagtgtatgaatatactgcttactttatctttaccctttcattcaccctcacctcatcatcccaatttgtaggataaaaatgtgcatttctgaggattcctacttccaagcttcctcctcaccctttgtaaccattccctcattcccttgatccccccaaccccatccctcatgtcttcacaatcatgtttttgctcttacttccccttcaccctccattacttcttagaaagcttcctatcctccctagtttggaacattctcaagcaacatgtttttgtagataagagaattccagcctaagctacattggatccaaaacagctttccatgaatcacccatgactatctgttttttggttttatattgctttccttgaagaggactgaggatactgtaccacttgaaatcatggtcactgttcataattttttcaacaaatatttatgacacatgttttatgttctagacattgtgctagatgttgggacaagatatgcaaagtctgagccctccaaggtgtgtatgacacaaaatagaataatcacgggaaatgttgagaaatgtcctggcttggatctagttatttctaatacaagaaactaagagaatgagacaggatctgattcttctgctcattgtaacaagctttagcataggcataggttgataatggatgtaggcatggggttagaatgccttgcccattcacatttatcttgtttggtttttacaaatgactctgttagtcgggaatgcagggcaggaattctctcgtagaagctggaactgaggttcaggaaaggtcagttgacttgcctaaattcgatgagactcctgccctattctccttactcgaagaggcctgagttaaatgcttaaaatcctcttcactgatggctcttcaggataggagtcagtttcaaatcttcagtgtaacggttttttaaatgcttctcaaagggagatatcagagactttcctgaatcagaatcacctaagatgtattataaaaatgcatgctcttgatcaagacctcctctgacctacccaattagactccctgtgagttctgggaacttgcatcttaaactcccagggtgatttttctgcatgtaagtttaactgggagagttttaatgtaaagcttcggtttgtttttgtttttgtttttgtttttgagacggagtctccctctgacgccaggctggagtgcagtggcgcgattttagctcactgcaacctccgcctcctggattcatgcaattctcctgcctcagcctcccgagaagctgggactacagggtcgtgccaccacgcccagctaatttttgtattttttttagtagagacgaggtttcaccatgttggccaggatggtctctatcgcttgacctcgtgatccacccgcctcggcctcccaaagtgctgggataacaggtgtgagccactgagcccagcccctggaaagcctcagctttgatgcagggttaacatttgcctttgggacatatttcgtcagcatctcaaagagtaacccatatgtccttgagcagatgggaatgcaacagccttctggccggaacctgtctctttctttctttctttcttttgagacggagtttcgctcttgttgcccaggctggagtgtaatggcacgatctcggctcaccgcaactccgcctcccgggttcaagcgattctcctgcctcagcctcccgaatagctaagactccaggtgcgcgccactacgcccggttaattttgcatttttagtagagacggggtttctccatgttggtcaggctggtctcgaactcccgacctcaggtgatccgcccgcctcggcctcccaaagtgctgggattacaggcgtgagccaccacgcccggccacttgtctcttttttatgcaagtgttttttggaatttgggggttcaggtgagcaggtgctctgctgctggtaactactcgcagttaaagatcttttgactctttccccgacacgctatttgtcagtgtcgttttccaccacagagccaggtatttgccccgccggccacggtgaggcgcgcgaggcgtgtgctgccagcttctctcttccttccccggtccgccttcgcgcccttaaggagacagtccctgggagtttctgcctttggtctccagttattgttctcttctcgcgagaactgctcctcccatcctcttctctcacgaagccccgcccgcggagaggttccatattgggtaaaatctcggctctcggagagtcccgggagmtgttctcgcgagagtactgcgggaggctcccgtttgctggctcttggaaccgcgaccactggagccttagcgggcgcagcagctggaacgggagtactgcgacgcagcccggagtcggccttgtaggggcgaaggtgcagggagatcgcggcgggcgcagtcttgagcgccggagcgcgtccctgcccttagcggggcttgccccagtcgcaggggcacatccagccgctgcggctgacagcagccgcgcgcgcgggagtctgcggggtcgcggcagccgcacctgcgcgggcgaccagcgcaaggtccccgcccggctgggcgggcagcaagggccggggagagggtgcgggtgcaggcgggggccccacagggccaccttcttgcccggcggctgccgctggaaaatgtctcaggagaggcccacgttctaccggcaggagctgaacaagacaatctgggaggtgcccgagcgttaccagaacctgtctccagtgggctctggcgcctatggctctgtgtggtgagtgtcgctgggcctggggccgctgtgggcagggtggcccctcgcgcccgagggccaggcctgctccactgctcagcgttgcgtcaagtggcaggaattttcctcgggggagggcattgctgccccttcgagctctgcccgttctgcacctccagcacccctcgccctgcactcacgcaggtatgcggtccaccgtgtgcagcactcaggtccgctgcgagaggtaggtggtggtgctggagctcggttctggctagcaccctgcgccttcccctctcggagggttgctgctcggcaacaggcaccgggggaagggccgcttccttgggggtctccctgcctacctggagcagaaggaccctctcccgtgatgcgcccacgctggggctccggaccctgggtcctctgagcagacaagctcggggaactgccgggagaagcagaagggcacagcccaacccgaagactgcggtcatctgaacaaaactgaccaggaagggagctctctccgggcctttttttttttttttttttttcaaaactctgtcgaaatcccatcttgaaaagcgttctttttgaattcgcacttgaattaacagcgatccatagagcttaaaataccgactttatctcggtgagcactgtgccagcttgagtggtgtgtttccgattcggttgaaagcgtatttcctttccgtggaggggcggcggtggtagtgcctgcaagaacactgcagcttgagaaactggcaggctcactgattagtcacataccactgctcatttaagtattgttcgacaaaacaattttctcatttggagcaagaaagattcagatctgtaaggcgccctcaagatcaaaaagttattaacagtgctgggaggtattgtaaatattttttgagataattcctgcgaatactgtgttttaaaagtcccttagagagcttgcagggagttatctagttatctgcatttatggcctgaggtacacgatggttttcgtaaggatatggaaccacatagaaaaggaagggaagagatactttttagctttaatttacaccgtgagtgtgttttaaattaagtcgatagcatataatttccagacctgaaatatttcactaactgctctcttaacttccaaggttttataccctgtattttagattttctataatttgaaagctacggatcttaaactaagtatcagatttaactgttagctttttctgtgttttagtaattcgtattgtatgcgtcatttgaaaacgggcctgtaaaatcgtttttttgttttggaacaaattccaggcttttggatgtgttaatctttaaatatgatttctgtgtttcccaaagtcacatcatgaatttcctgtttggtagaatcttctgggtaattgagattgtgcaattgtgtccagcaacagatcatattgcattttctagttcaagttgcttaagttatgttgcagatagcaccgtgcttgacatctttctcccatttttacagcatggcagtttacattttaaaggaatttgcagcattttacattcagagagtgtgtgtgtgtagttggtttgcagcattttacattcagtatatacatattatataggtatatacattcagtatatacatattatataggtatatacattcagtatatacatattatatatatctagttgatttgctaattttcaaagacgtatttggatcattgctcttttaatattttatagctcattaatatacttccattttttcattcttgaattgacatacatttctgtagtatcacgttttcgttttcaatgctatttaaattttaatggagtgatacagcagaataactcaactatagagggtttgggtgaactccaattgaattgcttgcaagggttcgctactattggtgactagctctgcactggaacaggagattcagatttacagtgaagtaccattaaaattaactccacagttctttagtggtatacttttctgtggtatagaagccagcagtatctgacacttaaaagtacttttattttattgaacagattttttaaaatacattgacattgtataaaatttgaaagttttacaaaggtactcagtgggccgggtgcagtggctcacgcctgtaatcccagcactttgggaggccgaggcgggtggatcacagcgtcaggagatcgagaccatcctggctaacacggtgaaaccccgtctctactaaaaatacaaaaaattagccgcccgtggtggcgggcgcctgtactcccagctactcaggaggctgaggcaggaggatgatttgaacccgggaggcggaggttgcaatgagctgagatcgctccactgcactccagcctgggcgaaagtgcgagacgccgtctcaaaaaaaaaaaaaaaaaaagatattcagtgaaaagtctcctttcctttttgttctccagccactctactctctcaaagacaggcactgttaagtgtcttgtgtctttccagagaggcagttttttttatttgcttgtttgtttagtagtctttctactaaagggatttaagatgtaacctacagcatattggtgaaagaaaatacaactgaaactgaaattgtatgacaattgacaataaacaaattataactaatgttggaatgaaaataccagaatttagatttacaattaagtgttatcttattcagagattcagcgtagttatttgaagtttttcttttctttgagacgaagtctcactctgtcgcccaggcttgagtgcagtggtgccatcttggctcactgcaacttccacctcctgggttcaagcgattctcctgcctcagcctccctagtagctgggactacaggtgcccgccaccatacccagctaatttttgtatttttagtagagacggggttctccatgttggccaggctggtctcagactcctgacctcaagtgatctgctctccttggcctcccaaagtgctgggattataggcctcagccacggtgcccagcctgaagttgttctttcaatgagtacctttttaggtgtggcagaaaacattttttggaacttcttttagaatccactttggagcctgtgatattcttcttcttttttattttgagacagagtctcattctgttgtccaagttggagtgcartggcaccatctctgctcactataacctccacctcatgggttcaagcgattctcctgccttaggctcccaagtagctgggatacaagtgcgcaacaccatgcccggatgatttttgtatttttaatacagacagggtttcaccatgttggccaggctgatctctaactcctgacctcaggtgatccacttgccttggcctcccaaagtgctgarattacaggggtgagccaccgtctctggccatccatcttcatttttttgagagcagatttgattttagggaataacagttcatttgaatccaaataatttagggaatttggastcaagtctgataagaaagataaggcaatcaggttggtgatactactgttttaggtcagataggagttataactataaagtaacaacacataattttttgtgtgacttcttgaactggacctgaagtctacttccaaaaaaatctccgaattttattttatttatttatttattttgtagagatagggtcttactgtgttgcccaggttggtctcaaactcctggcctcaagcagttcccccaccttggcctcccgaagtgctgggattatagggatgagccaccacacccagcccctgaattttattttcaagaatgaaaataaatgaatagaatatttcaatgaataaaattcattcattgaaatatttgtcagtttccgaattttattgctctaaagtgtggtatactttgtaacatttacaaattattttaagcctatattattttaatttatactaagtatagtaaaaaaacaagtagaagcctgtgtgataaccaactatgaatcaaaatagagttttacaaatatgcctttccgttaaagggtaaagggaactagactaggtcttgcagttttaaggaactttatgcattgtctgtgaggggaaatgaagcaaaattgtttaagaatacattgttgcaaagcattgattttggggttttgggacagaaggggagaatctttgtggtgagtttaaggaaatacaaacaggaacttaagtgcctttcctctggggtagggttcttccaggcccttgctgttgattagaggaggtgggacactggtaaccatgaaataggaggtgacagttgagaattactcttagatcttattcaactgtttattcaacagtgtttattgaatacctaccatgggccagatagctaggttctggaaatagagtgctaaacaagacagaaacaagacaatccattctctcctggaacttacagcctagtgggtttaataactacattttgtggattgcttgctatgttctagcattgtgctgtgcactttatcatcagcataaaaagtatataacaaaacctttggtaaaaggatagcaaaacttgctaagaaatcaaatacaacttcctaagtgctttgtggaacaagattattctagtataaaagaaataagtgaagctaactttttttaactattaatggccattcaccattttaaatctattttttttttttttagaatgagccagggcacaaagaaataaaagtgcatgattattaagtatacaagggtgactttcttgactcctgaccagtgagaagggtgtgccctttacttttctagtagtgatagtaggtccatgctgagctttccattcttttctttgtaaccaaaagtaaggtagttgcctgtatgttaccagtgccagtcaataagaagtctttaaacataattaacggcaagcatttgtattattgatgtataaagattgttttaagaaagagttcattcgaagctggctataaagtcattttattatcaaatcccatttttccactttttttttttttttgagacggagtcttgctgtgttgcccaggctggggcgcagtggtgcaatctcggctcacggcagcctctgcctcccgagttcaagcaattctcctgcctcagcctcctgaatagctgagattacaagtgcgtgccaccatgcctggctgatttttgtatttttagtagagacggggttttaccatgttggtcaggccagtctcgaactcctgaccttgtgatctgcccaccttggcctcccaaagtgctgggattacaggaatgagccaccacacccagcctccactggttcttctttaaaataagcttatcctggatctccaggttttcagttctgccagtttgatttcttgatactgaggagtactctgcttttgatttctttctagcccagtctcagagatgatgtgttgactttgcctttcatgggcaagagtgcagatattgctgagcccctggggcctagaattcaaagatggaagaattcactggggtagatcaccctcactttagaattaactgacatttttagggatttttgcagtttataaagtgttttcattcaaagcattatcaatcagttctcactagctccatggaggctcatatttattaactccattttatagatggggagctggactcattcattaaaggaatggcatacttgtcaatgctacttttagtagtctcctttctgatagatgtgggctgctgaggttgcgcggtggcaccttctcttatgcagttaacctcctcttgtgaaaaaggggttgctgagtcactcggaatagagcttgagtgtaggaaagcagttccaccagtgtcattgcccagtttatgtgaggggtaatgacttaacccatttaacccattagagtcatgtctcttcctcagaactgataaatcaaaaatgcactcattgcccagattaaaattttttctgaaggaattattaggcagtgcaaatagttaattcctgaatttatgaatcctattggattgaaattcttcagtgtacatttatgtaaagttgggactgtctgtacatgtttgtgttacataagtataggatataaatagaaataactgcctctccagccctttgaaaatacattagatttttgctttttgcagtaaaatttggggtaaaactgatttgttcttatctaagaggtataattactgcagtgctcagaaaagcctcattataaagtgggctcccctgacttggaacttagggatgtcttctcatggctgctatggaagtcatgcagctgtttcgtcaggaaaataaccaaaaacttctttaaacttggaaatgtttttgtaaaagaaactttcagtattcagagtagtttgtctttcacagtgcttccataaattaagcacaggcacaactcgttttattatgcttcacagataattgctttttttttgcaaattgaaggttagtgacaaccctgtggtaagcgagtcttttggcaccatttttccaaaagcatgtgctcacttcatgtctctgtgtcacattttggtaattctcgcaatatttctttctttctttttttttttttttttttgagacggagttctgctctgtcgcccagactggagtgccatggtgcgatctcggctcactgcaacctccgccttccggtttcaagtgattctcctgcctcagcctcccaagtagctgggactacaggcatgtgccaccacacctggctaatttttgtatttttagtagagatggggtttcaccatgttggtcaggctggtctcgaactcctgaccttgtgatctgcctgccttggcctcccaaagtgctgggattacaggtgtgagccaccatgcccggcagttctgctgggattacaggtgtgagccactgtgcccggcagttctcgcaatatttcaaactttctcattattattaaatattatggggatctgagatcactgatctttgatgttgctgttgtaattgttttgaggtgtctggaaccatgcccataggcagacttaattgataaacattgtgtgtgttctgactgctctgccaaccagctgttccctctctccatctcctaaggcgtccttattccctgagacacaataatactgaaattaggccaattaataacactacagtggtttctgaatgttcaagtgaaaggaatgtttgcatgtctcttactttaaatcaaaagctagaaatgattaagcatagtgaggaaggcatgtcgaaaactgagataagctgaaagctaggcttcttgtaccaaacagccaatttgtgaatgcaaatgaaaagtttttgaaggaaattaaaaattatattccagtaaacaaatgaatgattagaaagcaacacagccttgttgctgagctggagaaagttttagtggtctggataaaagatcagaccaaccacaacatgcccttaagtcaaagcctaatctagagcaaagccctaactctctttaattgtatgaagtttgagacaggtgagaaagctgcaaaagataagtttgaagctagcagagggtggttcataggtttaaggaaagaacctgtctccatagcataacttatagtgcaaggtggctgggggcggtggctaacacctgtaatttcagcactttgggaggctgaggcaggcagatcatctgaggtcaggagtttgagaccagcctggccaacatggcgaaactctgcctctagaaaaaatacaaaaatttgttttttatattttttggtgttgtggtgtacacctatagtcccagctgcttgggaggctgaggcaggagaattgcttgaacctgggaagtggaggttgcagtgagccactgcaaccaagtggcaaccgagatcgtgccactgcactccagcctgggcgatagagcaagagtacatctcaaaaaaaaaaaaaaaaaaatcaatagatgagaaattgcttctcaggaatgaataaataaagtagtttcttgaggtggaatctgctgttggggaagatgcttatgaacattgttgaaatgacaacaaagggtttagaatattacataaacttagttgataaagcagcagcaaggtttgagaggattgactcccattttgaaagtagttctactgtgggtaaaatgctatcaaacaccattgcaggctacagagaaatctatcacgaaaggaagaataaatcaatgcarcaattcaccgttgtcttatttttagaaattgccatagtcattccagtcttcagcagttatcaccctgagtagtcagcagccatcaccctgagtaggcagcagccatcaacactgagacaagaccctccaccagcaagaagataataacttgctgaaggctcaggtgacccttagcattttttagcaaaaaaatatttatttatttatttattttttctagatggagtctcgctctgttgcccagcctggagtgcagtggcacgatcttggctcactgcaccctccacctcccaggttcaagcaattctcccaccttagcctcccgagtagctgggattacaggtgtgcaccaccatgcccagccaatttttgtatttttaatagagatggggtttcaccatgttggctaggctggtctcaaactcttgacctcaagcgatcctcctgcctcggcctcccaaagtgctgagagtaataggtatgagccactgtgcccggctaataaaatatttttaaattaaggtatgtgcatatatatatwtttttgacatactgctagtgcatacttaatagactacagtatcatgtaaatataacttttatatgcactgggaaaccaaaaaatttatgtcactcatttttttgtgatattcactgtgttgtggttgtctggaactgaactcatgatatctttgaggtacacctgtatgtatgtgttaaggatttacaaaattaaccagctttcccgtgcagtgttcaagtcttttaataatttattatagggaagaagaagtggtggtttgtaaattctgtacttgacaaatggatactgggttttgggcatgcttggctccaaggctgaatgttgggggaaagaagtataggagagtgaggagtctaggatttctaagttttggccttgggcaaatggatatattttagtgccattttctgaactttgtgttacaaagttacaaaagagtgttacagggtacaagattgtagagagaaaggggaaggagcataggttcatggtaatctccttgaggacaggactcattataccttgagtgcctaccatgtatggtttgccgtaagtgctggagatgaaatgtgaacaaaagagacaaaaatttctgccttaagaagctatattctggccaggtgcagtgagtggctcacacctgtaattcctgcactttgggaggccaaggtaggtttccttgagcccagtagttagaaaccagcatcctgggaaaaatggggaggctcctctactaaaaaataaaaataaaaaattagggatgcttggtggcacactcctgtagttccaactacttgggaggctgaggtggagggattgcttgagcctaagaggattgcttgagcctgggaagttgaggctgtagtgagctgtgatcctgccactgtactccagcttgggtgacagagtgataccctgtctccaaaaagaaaaaaaaaaggaagctatattctaatggggatggcagtggaagtagataataaacaaaatatatagtgtgtcagataagtgctgtggagaaaatgcaagaagggaaggagagtgagtgctaggatggctgttgcacttttaagaaaggtgaatacggtaagcatcattgataaagtaacaattgagcaaaaacctgaagaaggtgatataggacactggttggacatgggtgaggatgtgataacattctaggctgaggattagcaagtgtgcaaaagccctgaggtaagggccctgtgctccaggaaatagctaagagaccagtacagctagagctaaatgaaccaggggccaaatatagggagaaaagtggggtgaggagagggttgcagatatgcagggatcatgtagggtcttatttgcctttrtacagactgtgacttttcctttaagtgagaggggaagccttggagggttatgaccagaggaaggacatgacctaaatcttgttttaacagattactgtgctctagggtcccaagtttttcgtttcggttccttacccattctaccctaaaccactactgtgaataggatagaacggtggagttagatgaattggtgcaagccctgacccatgctcacaactctcattccagcagtcccagagtgccagagccagtatttttgttgggccctagaaatttagggtattccagtccagctctttaaataacatgggctgactttactttttcaggtttttgttgccaaaaggaaggagcagagattagctcttgagtttagctgaaaaaggaagattagtctgctggcagattgagtgttttttaacttctttggcttttagggtttttcttacttttggatcatgttttaaaagtcatttttaccttctttcaacagttaaacatttaagttttatttgattttatttgaccctttttctgctttacattcctctgccttttccccattataatacttttagtagaggttagaccattgttatctgtcattaatgtcttagctttgaggccccaaggacttctctgttaaacttaaatatatcatatagattgaaagattatctacagacatgtgatcctataaaaacccatattatttattgtcctccctgcctttacagatgtaaacccctctcctcttttcatcagagctccccckcttttactgctctatcatcaggttgcagaaaataagttttcctgcaaacatagattcccatggcaacataacaaaaaggtaatagaacaaatgtttattttgtctagacctgctgtctgagtaccattagaccctgaacatgttggctcctgttatttgaatatgtggttacaaattccttattttcctcaaaacttacttctcttaggccttggtgatattgtcactgtgcctgtgatatgaaggaaggtgtgtgtgtgtgtgagtatgtgtgtcttactgtcattctactcaaaagtgtgtattgattgcattttcaaacttatggcttaaaatgtagacaccacacaatctgagcatgtgaagaaaaaaagcataccagttttgttctttgttttcgtaagttcattaatttaatatttccagtgcactatactagatattttgtttacagagattttaaaaaaaagaagggtccctcctttcgaaagtatcagtccaggctgggtgcagtggctcacgcctgtaatcccagcactttgggaggccaaggtgggcggatcacttgaggtcaggagtttgagatcagcctggccaacatggtgaaaccccatctctacaaaaattagttgggcatggtggtgtgtgcctgtaatcccagctattcaggaggctgaggcacaagaatcacttgaacccgggaggcggaggttgcagtgagccgagatcactcccctgcactcctgtctgggcgatagagcaagactcagtctcaaaaaaaaaaaaaaaaagaaagtatcagtccagaggagacatatttatgtttcctcatagatggctttggaagtcctctgtagttttggatcttgaagcattttaggttttggattttcagattagggatactcaacctgtataacccagggtaattcaacctattgacactttaggtgggataatgttttgttgtgggggactgacctgtgcagtgtagtatgtttagyagcatccctgtctccaactcactgtatactaatagcwattcccagttgtgacaaccaaaaatgtctagacattgccacatatctcttgacgggtagggagggcaaaatcacctttagttgagaaccacttatataaccctayatatttggattgataaccctgtatatttgattgagtaaaaactagatgggataacatgaaccttccacctgcaaaaaggcagaaatgctatactttctgcattataaattgggcctctctaaacatgatttttgttatttctaggagagtaacagcatttctaatggtcaaggtcctagctataacccaataagcttaatggatgggagaacttgcacaagcatgtttgcaagaggccaggtgtatcactggcacatttgagaaacaactaattagtgagggagacccaattttcatgaataattgtgttttgtcattgtcatggccccaacttagggtgttttgaattttttctggaaaggaaattagcatgaagtccaagttggtaggtaggtagcattttccctagtgtctcttctggtattctgtgtcctttctctcctgtcttctttcagtatttagcgttttcaaactcctagaaataaaatgctgtttagaagaccacaaagagagctgcacataaactaaggagcaagaagtagtacattgtgaattaattttctgtatgtttttgaaggttcttgcatctgggaaggcttgcttagttttaaaaatattaggtaataacagactgaaattttgaagatcttgtggatctcaggtagcagtaactcaggaagatcagccttctttgatttagaatgtcatttaggcacattatgtattctggtaccttagaagatacaatgcmttttcctgaattatcattgctactgctttaattactttaagggtgtgaggcagtaactaactttagtgtcacaatgtatacatcttaacatttattgtgctcttttttttttttttaaacaccaccttaaagtactctgctattcagatttttccttgtgtttctctaattctcctatttcatccattggtcagttttttcttcctcttttctttctgctccatgatccattcttaaattttcttttctctttctgtgcatattctttttgaattcattatctgatagtctcaacaatggtcttgttcatatactatccttccaaatttgtactttcaaacctaatctcaagaatgactgatcctttggattctaaatctattgagatgtaatgtttcatgcttttccttgattactttcctacacacttcttgaagataccagagatgtagcactaacttccgttggaatgggattcatgttacaarcttgaatggttcagtttagatatgtgaagcggatgtcatcattagcactgatgactgacagtagttataaaaattacaatcaggaatgaaccaatttacctgaagttttcaataactctaggtattaatgcaacataattttgaaagtttgaaatatataggtataaatattgatgcttatattttagatttactgtagtgaaggaaatttgccagtcgtccatcagtgttaaatgcccaccaatgtgtaaaagaaatagacctaaaatattaataaattgtgtatatatgtatgaaggtattgatgtgtacagagaagtggagacattgtgagttatagtggtcagtatggttttatggagcagaaaggatttgaagattatttagaaagatgggtatttggagagaagaaaaggaaacattttcagacaagagaaaacataaaccakagaatagatatgaaaaggactgttctgacaggaggaacatctcaggtagggtgaacccagttgtggttctcattcttgttgtgcttcagactcacttgtggaacttttaaacatacctctggaaattaagaatgagatctggagtgggacttaggcagttgcatttctaaaaagtctacaaatggttctttaggtagtagagagctgttggagtttcttgagttgtgaactgtggaggaaaattgttttaaaattggtcttggtggagtgtaaagaatggattagaggaaacaaatgtattgctttgtcaaagtctsgtaaatttatgtgtgcctctgttcattttgactcctcggctagatttcttagttccttgaggtcataaacaatcagcttttaaagcttcagtgaaggaatatctttttttttttttttttttttggctgggttgggggacagggttttgctctgtcacctgggtggaagtgtagttacgcagtcaatggctcactgcagccttgaactcctgagttcaagtgatcttcctacctcagccacccaaagtagctgagactacaggtgtgtgccgccatgcccacctaattttttttttttttcgtagacacgaggtctcactatgtcatgaagttgcccaggctggtcttgaactcctgagctcaagcttcctcctgcctcagacttccgaagtgctaggattacaggtgtgagccaccgcacctagcaggaaacatcttataaaatcattctactttcatttggaacttgcaggctcgtgcctgcaatcccagcactttggcaggctgaggcaggtgaattacttgagctcaggagctcaggatttctaaaccagcctgggcaacatggtgaaactttgtctctaccaaaaatataaaaaaattagccaggcgtcgtggtgtgcctcagtagtagcagctactcgggaagctgaggtgggaggtttgttggggcctgggaagtcaaagctgcattgagccgtgatcatgccaccacactctagcctgggcaacagagcaagaccccgtctcaaaaaaaaaaattaaaaatgaaagtaagtttcattaaaaaatactatatatgtaattacagtggtgaaattgttttgtgattaaataaatactgttgtgttgacattaaaacaagatatttgagagttagcgaagatattaaagctaatgttttaaattttgagtttttaaagtcaatcttaaatctcctgctactctgaagaagataaatgtatataattttaatttttctatttcactaggtttgaagaatattttttgaggttcctaaatcaaaacttaagttccaatttttgcataaagttgcctttattttcaagacgttatttccaaaatggcaggacagagcatccgcttcagagcaacagtgatatttgcacatttacttgaatatggaaggaagaaaagctaggcttctgtaatagaatgtaacatgtgcagaaaaatatttccagtatgtcatttattgaaatttgttccaggtgctacaggtaaagagaaagttccaagttagtggtcttaattatttagttatttagaaggcaagttttgaagactattattaattatcctgattcagttggaaaaaaagcctgaaattgtatgatccggagaagaggtgtcatgtttttgcaaattatttcttctcactttatagatattcttttttctttttctttctttttttttttttttttttttttgagatggagtttcgctcttgttgcccaggctggagtgcaatggcacaatctcagctcaccacaacctctacctcccgggttcaagcgattctcctgtgtcagcctcccaagtagctgagattataggcatgcaccaccacacctggctaattttgtatttttagtagagacgggatttctccatgttggtcaggctggtcgcgaatacccaacctcaggtgatctgcccacctcggcctcccaaagttctgggattacagtcgtgagccaccgcacccggccctcactttatagatattctaatgaatttaatgtattaatgagactttgctaattcagtgtaactacagatttcaatatatttaaatatttccattaacttccaaaagtaaaccaaattgtgtttatcttcttagaagtcatctatgaccattgaaagaaattgtaaaatcacttacgatccccacaaattactcaaagacttgctgagtgattactcattcttcatattctgttgatgaaaacacagattgttttttgaggaaaatcatggtgcagtcgtttgtactttaatactctgtggacatgggcacttgtccagcaccttacctttcttaagaggttgtctccctttctctactcagctgatgttaaatttattgatctgccattaccttataacagaaaatctacaagtcaggtgcccatcatggaatataaacacaagttccctatatctctatacctatcaaaagctcagttgacagccgaacatggtggctcatgcctgtaacccaaacactttgagaggctgaggtgggaggatcgcctgaggccaggagttcgagaccagcctgggcaacaagcaaggccccatctctacaaaagaaaattttaaaaataataaacaaaaagctcattgatagctccagtcatctttggaggattgtctgaagaatatggagcttatctgtttttctaaatgtatttaagatttcctcttggattaagtctgtcagagaggccaggtatggtggctcatgcctgtaacccctgtacttattgggagtccaaggcaggaggatcacttagcctaggagttcaagaccagcctagggaacatagtgggaccctgtgtctacaaaaatcaaaataattagcgaagcttggtggcacatgcctgtagtcctggctacccaggaggctaaggttggaggattgcttgaggccaggaggttgaggctgcagtgagccatgattacatgactccactccagcctggatgacagagtgagaccttaaagaaaaaaaaaaaaagcaacaccgtaatattttgtactcctaccctctttgctaataatgaactgtattttggccttacgacagcaatctgtactgatggatgctctaaaaagaaaaccatctgaaacccactattatattcttttaaagatgttgattaggacatttttaccacattatatgtctccttcttgaacagacacagaatgaacttttccctggtttattacaggaataattatgcctctcttcagctctcctgagtacctggttggtttttattgtatggcttctgtgattcatgtcctaactgattctgttctctttgttaatggctttagtgagctttgagccaaatttgaggcctacctctaatgggtatttaaaaaggacctctggccgggtgtggtggctcacgcctgtaatcccagccctttgggaggctgaggtgggcggatcacgagatcaggagatcgagaccatcctggctaacacggtgaaaccccatctctactaaaaatacaaaaaaactagctgggtgtggtggcatgcacctgtagtcccagctgctggggaggctgaggcaggagaatggcgtgaacccgggaggcggtgcttgcagtgagccgagatcgcgccactgcactccagcctgggtgacacagcaagactctgtctcaaaaaaaaaaaaaaaaaaaaaaaaagaaagaaaggacctcatgatatatgctaacctcagctgtacagactttcttattttcccttaatcacttaccattttgtcaggttttatatatataattccagtctgctttaaatccattgtgaataaaggaaggtatacatcaataaatttagaagttaaacagaattatattaggatatatgaagaatctagtaacccacattttctatgtgtgtgtgacacaaggggaggcaagtatgaatgtgtaacaaaacattgaagtttatttaatgattatccttgtgtgttatgtactggattcacggtcagcagtagatgagtgagaatgacatcctaatattgtaataactgcttctaatttttatatttctttcagttattttttactataccaatgattttataaaatgtgaattaatttgataattttggaaaagttcatgtaaattcacaattgggggaaaaacttgttaaacagtatgtcctgaattttagtttggagaacctgtttatcataaagataatttcattttatgatgttgttcatgraaacaaggttttacttgtagctctacttttacagatgtgattgagaggcgtatttgagctttgccatggaccaagctccttgccaaacctactataaaagttattacatttaatcctaacatatccaacagatgaaatataaacataattctcatttcatgaaagaatttaattaacatcctcaagattatatagctattaagtggcagaactggaattaaaatccagatagtctaattccaaagtcccagctcttatttaatcactctgttggagtattataaacatgtaataataaattgtgattgttggggtctatagggtactgattaattctagcctgccttttgctgaatagattcaggagtcaaatagagataaaaatatttacttttattagtaaagctggcatgcagagtgccttgggcgggcaactcaagtgggcttcttatttcttccccagttaattgaacttgcacacttaatcagtcagatcagctagaaaactgctgctgttccttgctccccagcaggcttaccaatggaggagagaagaaagtgttcagcttgcaggtggaaggcaaactctgaggtgggaagttgaagaagctgggtcccacaggggcaatggccatttttccagtctcaccagagctagtttagagaactgggtttagagatgagtatacatttacttgctacttttgagagggaagaagttactaatttatgggtttgtaggagcaatgggagtggaaaagaagagaaccaccaccctcttttatgtgagataaggaaggagtcagtgagggtgttgtgacagagtaatggcttcttagaggtccctaacaggttcctgagcaggtgactatttaaaccaatacttgaaggataaggatttagctatggggtgggatgggggcggaggagaagaaaatcctaggaaccaggagcagcctgtctgaatagttaaaagaactgaaaggagctagcagaacatagcagctgagagagagggaaagagtagcacaggaacaggtggaataatcagtggtgaccagatcacctgggccttgtaggccatcatgagaaatttgcattttactctgtatgccaaggagattccttgaatggtttgaaggaggggagtgttgtgatctaatttgtacttttattgctattttttatttttcatttttgagacagtctcactgtatcttccaggctagagtgcagtggtgccatcatggcgcaccacaacaaggttgagcagcttcagccttcctgggctcaagcaatcttcctgcctcagcctcccaagtagctgggcatggtggcccatgcctgactaattttttttttttttttgagatgaagttttgctcttgttgcccaggctggagtgcaatggcatgatctcagctcactgcaacctccacctccctggttcaagcaattctcctgcctcagcctcccgagtagctgggattacaggtgcctgccaccacacccagctaatttttttaaatatatatttttagtagagatggggtttcaccatgttggccaggctggtctcaaactcctaaccttagcctcccaaagtgctgggattataggcgtgagccactgcgcctggctgcctaatttttaatttatttattattatttttttgagacagagtctcactctgttgctaaggcttgagtgcagtgatgcaatctcggctcagtgcaacctccacctcctggattcaagtgatcctcccacctcagactctcaagtagctggggttacaagtgtgtgccaccacaccccactaatttttatatttttttagtagagacgggtttcaccatgttggccagactggtattgaactcctgacctcaagtgatccacccgccttggcctcacaaagtgctgggattacaggcgtgagccactgcacccaacccgttttttattttttgcagagacagggtcttgctatgttgctcaggctgatctcaaacttctgggctcaagcaatcctcctgccctggcctcccaaagtgctaggattacaggcttgagccattgtgcctggcataatttatatttttaaaagactgtattggatgcatttggaaagcatattagaaggaggtaggccagtgacatggactaatatgatattggtgaaatgaagagcagttgactttgagacgtcttttggaggtgaaaaccatgagacttgccaatagatttgaatgaggactgaggaaagggagaaatcaaggatgacaatcaaatgtctagctcgagcaactggatgaacagtccatttattgagataacagagccatggagaagaatagttctgggtgttttgaacttggtacgcttcaggtgcttatgtgtctttcttatggagacatcagggctcagagaagagatttcagtgagagacataaatttgggagttttcaatatatagatggcatttaatttaaagtcatgggcatagatgagattatctagaaagagaatgtgggagagagaagagggcccagtaccaagtcctgaagaactccaacatacagagtttgagtagaagcagcacatgcagtggagacagagatggagctgccagaggggtcatagaaaaccaatggaagtgttgatatagactccaggatggacagtatttagagaaagtggtgactatgtcaattactaatcttagaaaagtggatttggtagcagaggtcattaatgaccttgagaagagcagtttcagtggaattggattgaggaaagaatgggattgaaatgagtcagttgtgtagatgtgtgcttctcacaccttaagmggtatattaatcacctggaaatcttgtcaaaaagtaaattctattttagggcccaagatctcctttcctttccttttcctttcttttcttttttcctttcctgttgtctgcagagatcctgcattttctaatgagctcccagataatgtcaatgctgccggtccatggagcacactttgaatagcaaaggtataaattagtggttctcaaactgtaatatgtattagaataacatggagagcttgataaaatacagattattagacccacttcaaagtttcttattccattaactctggggtggtacctgagaattttcatttcttataaattcccaggtgaaactgatgctgctgatctgggaacctctggtgtaggtgacttttttggagaattttaactgtgatggagaactgttaagggaagtcttttgtttgttggctgaaggcggtaaacaagtagagcaaatttatgctgatgagaatggtccagtagatagggagacactgatgatgcaagagagaagaggaatgaagaagtgaaatccttgagaagatgagggaggtggctccaaagcatgtattgtggtcttgaattttgataagcaggggcatattcttagttatagcaagagggaaggtggagacgatgggtttatagatttggggctaagcaaatggagctcccctcctgatggtttctgttttctcagtgaaggcaagggcaactcttgagggaagagggtgaattggagatttgagagagaacatgtcaaacgatcattttcgagtaggaaaatgaacttactagaagaaaatggctttattgagagcctctttgagattaaggtcagaaactaagaatgaaaatctgattctacagtctttcttgttcaacctcagttccttggattcagtcatggagaattaagtggttgagattacccaaggttagactttatccaggtgagtacatcagagagacagacagacagagagagagaagtgcaagggagtgattataatcatggaacaggaagggagatgaagacagaagagggctgaaggatagaaacaagcaatgacaatgaggttaacaaattgttgtagtcagggtacaagtaaactagaggtaactaggtttttgatgaaaagcaaatgctgctggcattcaaaattttgtaggtggggcagtttttggtaggaataaaggtctagaatgtgaccatgaagatggctgggtgtggtggagtttcctagagaggtcaggaaacaggatgttgggtgtgccgttcacctggatgttgaagttgccaagaatgatgacagaagttgagagtgtagagagatcttctggatagaaactaacttttcaatgaatgatggaaaatttcaggtcagtggatacctgcagcagagagggatagtttatcagggttgtgagcaggaggtattttatagaacaaacggaaagtaatggtcctgaagtggtaacggctgccaaggaagactcctacgcacctgctagccaggaggtatctgggctattagagaatgctttctaatggcagggctataagagaagcagtgtcttctagaaatggcctagtttcagagatggaggggaggttcagaaaagaggttgaagatttataggagtttatcacaaattgggatttgaagattgagggtatgccataaaagtttgggagtgaaaggaagggcactggagtaggtacagagttgtaaaagcaagtttggcaggcagagagtttggtgataacagatgaccagaaagtcttggatacatgttagagactgagacaaactggaggatgaggcataatggaactggcccagacaatttctgttattactatttttttttttttttgagaccgagtttcactcttattgccaggctggagtgcgatggtgcaatctcagctcactgcaacctccgcctcctgggatcaagtgattctcctgcctcagcctcctgagtagctgggattacaggcacctgccactgcgcctaattttgtatttttagtagagatggggtttcaccatcttggtcagactggtctcgagctcctgacctcgtgatcctcccgcctcggcctcccaaggtgctggattacaggcatgagccactgtgcctggcgacgatttctaaaaataattaaaatacacatcgcatttttgctrtagatgtcctccatgatctagctgctgcctgcatctcttacgtcatcccttcccactctccccttgctccctgtgctctacccacacagcctttctgtctttctgtcactcactccagcatgccatacgtttcctacctctgtttcttttttcgtttgtttgcacttgctcttctgagagatagcagagtcaagtggtcagtagcataagctctggatccagactccctgctctgccgcttttaagctttgtgaccgtggtcaagttacctaacttctctctgcttcagtttcttacttgtaagtgggagaatgataatagtacttatttcataggggattcggggaaatacaaaagctgaattgagacaaataaatgtaaagggcttagaacaatttcttgtatgtgtgggtaaagactctataaacattaatattattattatttcttctgcttgaagctctttttcttatatatttatatagggaatttaatcattatattgtttccttctcagctcagatgtcattcctcagccatcctagctaaagtggtataactccactggctttctgtcactctttatcccattacccttttatttagtcatagtattttcatcactacttgaaattattttattattctgttctgctcttcccccattccctgaaggtgccaagtactttgtaggtgctcaagaaatatttgtggcaatttattgtcctgaaaacatggtttcctgggcctcgactctgagcaggcagcagatgtggcaaggtgacgacagtgaggcctaggcagggaagacagaattcaactctgtttattaatctgttggctcatctagatcaggcagctgccagtttttgtaaattttattagaacacagccacacccattttaaaacttattttctggctgctttcctcatacaaccacagagttgagtagttgtgacagaggtcttacttacaaagttgaaaatattactatctggcccttcattgaaaaaaatttgctgacttctgatttagatacatagaaaagacaaggagaaaacaccaaaaataataacagaagctttatttggataatgggataataggtcattttgctttttatctttatgcttttttttggtattttgttatagaccctttaatttggaaatagccttataaataccccaaaataatatttagaacagctttttaatggtgggttttttcccttttttctccttagtgctgcttttgacacaaaaacggggttacgtgtggcagtgaagaagctctccagaccatttcagtccatcattcatgcgaaaagaacctacagagaactgcggttacttaaacatatgaaacatgaaaatgtaagttattcattcaaggaagaatacattttgatcttgaatagactggggaaaaatgttttaattactgcagatggaaatacgctggagtgcatcaaacgttggtccctgctccttgtcctggggtgttagtggccacttggttatgtcaggtcaaagacttggaatgaaagtgatgcatcttcctggagttttagttttactcaaagatttttagaggagaaagaactctttaaaattttaaaattaaaggatatgttatgaaatacaacacaaaattcacaataatttttaagagaaaatattaaaaagaagttatgtattctttgcctggttttcctaaggctatattatgagaatatgggagtctgtggctattaaaagacaaaatagccacagactcccatattctcataatatagccttaatatttttaagtggaaaaatctgagaaagagtgccttaggctcactgaaagtcctatcagagatggctattattttatatatttgttaataatttttctttttttccagattcacgtattttaataaatatgtcagaggcattgtttaagttaaatataactttttcttttttaccaatttgttgattcagttgccattctgcaaagatgcttacaaattctaatacgrtaaataagtggatataattggaatactaactgaaagtaaaaagacagttgactgaagacacttattttactgaatttcaaaatcaagttatgaatttctgtgactgctatatgaagggtactgtgaagtttgtagcattgtggaaacaatggccatagagatttcaaagtcctctggctgtactgcttgttaccttgtggaagaaaattcaaaatctgtgaatttattatttgactatttagactgttttagtaatttaacttcttcatagcgagaaaaaagtcacagataagtgactcttcattagcgtacatttgtttcattagtgcaaatttcttctaaattgagaacattaagacttaaatttgtaattggattatggatgccattataatcacagctgctgctttttattttcacattttattttgattgtatgctattgaggaaatcctatttctacagacaacttctattcctgagtataattttacttaagtagctatgtgcaaaccagagttttaagaatgttcagtgtgaagctgcagccttcctaatcagtgacatgtttacaagaagttgagatatgcggaaaaagctggcagcagaaactttattcctaggtctgcataaaatcaaagtggcctggcagctttaagggatgtgtttgcgtttgatttttaacacatttaagtgtgtatgctgtttttcattacacattattatatgtgacagagacagtgtcacagctttgcaagtataaaggatattttgaaagtgaaatgcaagccaaacatttatggaaccccagagcacctttgggagccactaggatcctattgatgtggctatgctaatttaagaacatctggtttaggagattatcagtgctacactgattgttttgcttttcttcataaatatgttaagccaatgtttagggatcatggtattagaaaaataggattttaatttctatacattgttttataagtggcttgcttactagcagtcttttttttatataaagatgtttaagttctaacagttggtggtcacctagatatcagtgatttgttatttaaacaaaataaggcacatggctgaatgtctcatagttctctattccattggcaaatgtttgaagccaaaagacttgactcaatgtagaaaaattcctgcattttagcctattttgaaaacatttgttaggtgcttataatgtcaaagtagttttacccaataaagaaccaaaacttccggtaagtttaattgagggttttcagagaaattcatctcgtttaccctcctcttcttttttaaaaaattactgttttgggtcaccatccaatttttatagcggccaaacctcccacaggcagcagcaacaggcgcttaaaacttgtgaacattttaggtgttggtaacaaatacaattttcaggtgccagagggcacatgtgatcttttacacaaaaatgcctctgacccacaatyggtagttcatcttgaattgtctcttctgttagtgatcatgaataatagataaacatttattaggtgagtgactgaagctaggggatgtcctctgtgactgtgagagtttctctctgaacaaagttagttggaccattcctgattgaacttctgaccttgatctcgttaacacctgctctaaggaaagattaaagggaggcagcctgccagctgcatcctttgctgtctgggcagacactacagagatggcccatatatgggcctagagatctgtacattttagaatttaaaaatgatcaaggaaattgttttgtaaattttatttgggagccttagatttaaccttaccattgtagaccaagagattgttttggtgtgcttttgttaaatatgctaaatattgtctctggatactgagttaaagtatttttttttggatgtgtgctaatttaataaaaatacgacttaatatttgccaggctttggaccatgatgggataatcattagagatatttgctgcttatttgtattatgaatgtcttttctaaaaatttgattcctgggttactttgaggtgactgaagtcatgtaacagcagaaggagttaaggaaatagactaaaatatgacttgatttagaagggaatttccatttaagaaatgagaaatggctgggcgcagtggctcatgcctgtaatcctagcactttgggaggccaaggtgggtggattgcttgaacccagaagtttgagaccagcctgggcaacatggcaaaaaccagtctctattattatattaaaaaaaaaaaaaagaaatgagaaatgaatagattcctaaaatattttccagatctattttaatgctgataagcttttgttttacagtattttccttatgattaatattcataagtatgattaatggagtgagggatattttgtaaaaacccatcaaaaatttaagtactttgatttagcatgggtagttttaatctcaaaattgttattttcggtgtgcttatgttaaacacattaaatattgtaaatattgccctttttaggaaattaaaatttggtagggtatttactagttggcttttctctattttttttcaggttactttatttttcttcttgcagtcatggtttttaatcatttgaatagttgagctttatgtctcatattctgttaatggaagtagctgcttcagatagtttgcttaggtatattgtattttgtaattgtctattcaactgtgtgggctgtggtcaccacttattttgatgatccacagtgggtcagccttttgtactaggcaccttcagatacattgtctgctcagtcttgctgtcagtactgtgaaaataagcaatgatgtcctcatgtttttcatatgaggaaaatgggactcagagaagataccaaatgtatttgccaattattatttacataacagccattcattgaactcctgctgaatgccaggctccattccaagtgccagcgttattggaatgaagaaattataagctcttggacccaagaaatcacaaactgatactggggttcaaacttacagctgcttggttccaaaatgtctgttgtgttttcagtttgaaattggagtttttatttgaaaatagttttgacttttgtcttttgaggtaactcttgcatgtgtaaatcagatctctaatgatttagttttatttccataggaggattttcacaatcacaatggaaacactgtaaaacaatgtaaatagttttaaacttttctattgttttgaggagatgggcatctcagataacaagaatcattgattagaaaatattggaacggtgaataaagttagcttctagacctcagttaccttaagtagaagtgggtataagggagagtgattaaaagaccagaggtcttaagccaggagtataccaaactcaagggaaacgattatggtttagatggagaaggtaaaaggaaatggatttgacttaaatttaaagcactattgtgaatgaggtcacaggtactctattgggaggcatgtaagttggccttacctctatggaggaccatttgacaatattaagatccttaaatatattggtgtcctttgattctgtaattctgtttcttgaaatttatttcctggaagaaaatatgagatgtgcaaaatacatatatttttcttgcagtattccttaaatgtctagagataggaaattggttaagttatggtatacacaaatgatagatatgctgtatacaaatatttaaatattaagtaaaaaggcaggatataaaactatgcatggtgtaaccccaatttaatttatgtacatcagaaaatcaaaggaaatatatctcaaaatgttaatgatagttataatgggtggtataattatgggtaattttggttttcttatgtactgttgtctgggtaagatctgaaagtgattctatttcctttggaacaattttcaaggacttgaaacctattcttgaattccaagtatgtgtcccaccacctccttttcargttcagactgtaaaattaaagttgcttttaaaaagtgacatttggagtcgggcgtggtggtgcatgcctgttatcccagctactcgggaggctgaggcaggagaatcacttatacccaggaggcagaggttgcagtgagctgagattgtgccatgcactccagcctgggcaacaggagcgaaactctgtctcaaagaaaaaaaaaaaagtctgatatttggatgagtggagtaacatcctaattagaagatctttttcatgataatgttttgagtgttaacatatcttacttctagagctttgtgtttaagttggcagtttagaacagtgtgctagtgaggccacagtcttgcttcataaccagatactctcaaatatggctgggcgtattacaaatgaattatatatttcttatttgccttgtcaatgcctaactttgtagaaatgaatggcctgggttttaaggaaaatagatgggaggtaggggttggagggtgctgtatgtggataaatcagtataaattcctgatcagaaaaactgctcaaagaccatgggttattgagtattaagtagctctttgctttatccctgtgtaaaaatagactttttttttcatttttaaattgtctgatttaaataccctatacattaagactttgtgagaataataccaagaatatactgagaatattttgagactttaaaaatgtcagttttgaagcatatacagttaatatggaaatttttcgtggaatacatttttaaaaaacacaatattacggtaacaaccatggaygtgtgacctttttcacctgttggattaattcattagaccattagtacatacgtaaggcaaggaccctaaatctttttgccttctgataaactactgactacatatgaataaattctaaagagatgaagatttttaatggtaaagtgggttaatatgagaattgatgttaacaagtagaaaacaaaagcataatttgggtagaaaattagttggagttattaagtatatgatgtgatgttatggaactgaggtagctggttttgaattagttcctattaaaatgattgagacgtggctggccgtggtggctcactgctgtaatgccagcactttgggatgctgaagtgggaggatcgcttgaggccagaaggtcaagaccagcctgggcaatctagtgagacacatctgtacaaaaaaagaaaaattagctaggcatggtggtggcacgtgcttatagtcccagctacttgggaggctgagacaggattgcttgagctgcagtgaactgtgatggtgtcactgtactctagcttgtgtgtcaagagtgagatcctgactctttttttttttttttgagacagagtctcactctgcacctgcactctcccaggctggagtgcagtggcgcaatctcgggtcactgcaacctccgcttcccaggttcaatcagttctcctgcctcagcctcccgagtagctgggattacaggcgcccgccaccacacctggctaatgtttgtatttttagtagagacagggttttaccatgttggccaggctggtctcgaactcctgacttcaggtgatccgcccgcctcggcctcccaaagtgttgggattacaggcgtgagccactgctcccggcctagaccctgactctttaaaaaaaaagaagattaagacctgatgggtactatactgagtttaatatttatttactttttaatttttatattttcttacaggtgattggtctgttggacgtttttacacctgcaaggtctctggaggaattcaatgatgtgtgagtaaattttttgcatttgccttcctggtctacagaatgaagactaatagcccatttctattcctgaaccatttagcaacatatagacttcaaaaaattctttattcctatcatgcacctctttttgggtgtagggatggataccagaagatgtatgttatgggtggtgcgtgttagtatttacatcatttcaggcacattgtaccccattgaagagtcagtcttgaattcttacaaaagttccatggagaaaggagtggagagagttttgactatggattttcttttcaaagtgtttatcccaggtttggttttgttgttgttgttgttgttgttgtttttgttttaaaagacacggggtcttgtgatattgcccaggctggactcaagctcctgggctgtagtgatcctcccacctcagcctcctgaggagctggaactacaggcacatgctaccatgcctggccgatcccaacttttaaaggtgctcttcaagaaatgtaacggatccccagccatatagactccctcctcttttatcgcccatgcatgtgggagatgatactagaactacatgctgatccttgaagtattagatttctatactgggataaggggcagactctacctgttgagaaaggcttcttctctcagctttgtaaccacctctgttgttttagcctgggatacccctagaaagcagagcctgggattctcaggaaccagtagtggggggctagggaaaatgaaacaggaaaggagagaaagcttctatgagtatatgttgagttggtcaccactatggacaattgggctgaaaactgccaagatctaagaagctgtacgtaatgcacctcagatggggatcattaatacactggctcctgaccccattggcaagggttgccacgtatgtcattagtgccttcacatgcccaggttgcacattggtgggccataagacagattccagcaagtgttcccatgtatgtgtgaactctctactatagtagcttttctagtatctgagttgacacagctctccctgcccccagttcacatatacactataccatgaaagagaaaaaaaccttaaacacagttatacttttggtcacattgaaattttggcattcctaaatggagagtgttactattatgaaagccaaaacagaactgaagatcgtgacttctcttccttaacctccattcccccattgaccccagggctgaacctaaccagtttctcctcacccttatcctggtttcagtttctcccattcttatcctgggctgattgcaaacaccgtttactccttccccacagaacacaaaggggatatgtttgaacttctatgttctgtctaaggaaagggagaaagaaataaagaagatgaaatggaaagggaaggaggaaaggtggcaaaaacatttctccaccatttgaatttagttggaacagtgtatggctgagagtagaagagtagaagttaagagaggagaatttggtccacctacaagatctccttggctacattaaccttgatcctgctaatgaaagtttaagaaacaaaggaaaaaaatagccaataactaagaaaaattgttcttctcgcagccctgcttgatacaacaatatggaggcttccagagattactggatgttactcaggggcatgtatattacagtttgttgagccctactgtatgctatagttggaaaagggaatgttacagaatgatggtttttaaaaatagttttcctaaatgtagaagaaatgctgaagtaatgtgtttgtgaattactttggaaaacatttgagttagatctgagctgtatcccaaaattttaggtatactaaggatggatttatataacaaaggaaatgatttgctgacttgtgcaaagtgcaaaatgctgtattttggcctaattgggcattctggaaccggattaagaacctatttttcctatgtgaaaagaccttaattaaggccagtgtctatttagaaggttaagtgttactsatagtggtgcctttgtttggctccttcatccatgtaaggacccagcaactacaaatctacctttgaactaaggtttcattcattcattcaaccattcattcattcatttattcaataaatactatggctgttgagcaggaatcygttctttctatttaactctagctggatactgttttttataaacaataactgagtttacctcttggaagcaaatctcattactacttgttgactacttactgaatgcagaacactgagcagagtgttagcacaggctcagaataatcagaaacagtcgcccttccttttgatgaaagtgtctggttgggggaaacgaattcaaagcacttttgtatccaagctaccaattggccatatgacmttggacaagtcactttaccactgtaggcccagtcatttcactgtaaaatgatgagaattgaggtcgttgacttctgaagtgttttaaattacagaaagtctctgaaaatagaatgaacttgtttgccctaagaaaaatattccattgtttactttttattgtgatgttcatatcactgaaaaaatcactgtagttcgactatagttatttcagtgttttctttttttttgagacagcgtcttgccctgttgtcacccaggttggagtgcagtggcaagatcttggctcactgccacctctgcctcccagctcatgcaatcctcccacctcagtcccccaagtagctgggactgcaggaatgggccaccatgtccagctaatttttgtatttttggtagagacagggttttgccatgttgcctaggctggtctcgaactcctgagctcaggtggtcgccctcctaggccactcaaagtgctgggattacagacatgagccgccacacccagccatttcagtattttctaaagttattttgggatatgcataagaaactaaacatcttcacctacacttgcagggtttgcaaatttaaataccttcagggtcacacaaagaacataaatgaggttcagtgttacacaattgggagtggtggggtctgtggcaaaatacatctgcacctcctaaaagtattcaaattcacwttgaaacaaaacaagtaaacaaacgaaaacctacacttctggccaaaccagacataatttaggctagagtggttctacaagctgcctgtttagagcaggctataatttgaacacaaatttttaaatgctaattagcaaaatctctataattactttcagatttatagttttttttttttctttttcttttcttttttttttttttgaggtggagtctcgctctgtcacccaggctggagtgcagtggcacgatcttagctcactgcaacctccgcctcccaggttcaagcgattctcctacctcagcctcacaagtagctgggattacaggcgcacatcaccatgcctggttaatttttgtatttttagtagaggtgggatttcactgttttggccagactggtcatgaacgcttgacctcaagtgatccacccacctcagcctcccaaagtgctaggattgtaggtgtgagccaccgcgcctggcctacagttggcttttaatcatgtgatacgtgtatttgtccctttatgtttcggttagcacttttaatttatatacagtcatgcatcagttaatgactgggatgtgttctgagaaatatgtcattaggtgattttgtcattgtgcagacatcatagagtatacttccacaaacctagatggtataatctacacacctaatctatatggtgtatcttgttgctcccatactacaaacctgcatggcatgttactgtactggatgctgtaggtaactgtaacgtgatgctatgtgtttgtgtatctaaacataactaaacatagaaaacaacagtaaaaatatggtactgtaggccaggcttagtggcttactcctataatcccagcactttgggaggccgaggtgggcagatcacttgagcccaagagctggagaccagcctgagcaacatagggaaaccccttctctacaaaaaaatttaaaaaattagccgagcatrgtggtgcatgcctgtagtcccagctactggggagtctaaggtgagaggatcatttgagcccaggggcagcggttatattgaaccatgattgcgccactgcattccagcccaggtgacagagtgatatatgtggtccactgttgactgaaacattgttatgtggtacatgactacttcagatttttgctatgttttaaattttaattcttacaaatgaagactatacctttgagaaaggaacaataggtagtgcattttgaacattaggaacaatatacagttactgaatctggatggagatgatttttggaaaatgtagtgttaaaagatggatatactaagttgctcttgaccaccataggatgtggttgtacagatggcaaaattttgtaaagatacagtacatctagatctcttaaatgactggaaatcctttgggcctttctgttggcttcttgatagtaatgtttggcaagatactgcatgcatatatattcctgtgtattcagcagatattaccagtagaaatgcaaaaatcttaaatagccaatatttgaacctaacaccagagcaagctgtaattcagtattactataatattgccttttckttgtgtgtgtgtgtgtgtgtgtgtgtgtgtttgttttctttttgtagttggggctacaggctcacaccactagactcagctgtttttatttttttgtaaagacaaggccttgctatgttgccttggttggtcttgaactcctggactcaagcaatcccccaaccttggcctcccaaaatgctgggattacagatatgagccaccatgcccccccccccacccctttttcttaactgtagtggttctttgcgcaagcatagtagacaagaattttttgattcctcctgggaactatttcctcaaatttcatggaaactgaattgtcatgagttaagtggaaattagtcttctgatactttttcctttattttacaagttcccatcccaggtttcttatactgaattccttatctctgcctcattcttgaagagggaaatggaagtggggttttggattctaccatgatagaagggaagacctacaacaaggctattcagcagcctttgttttagtgaaagccaatgagaagagatcacttcttccacttactaacaatgattgctyaactaataagtttagcttttttatttcaatgtaaaagttgctgaaaacactgaattggtaaaggaaatttctggatttacattttaacctgatgttgttcaataaatatttgaatatctaccttatgctaggcacagtaatagtctctgaggaatataacagtaaataagagctgaggctgttaatgggagagaagaacaatgtaaatgatcaaacaaaataccatgtggtaagacctgaaaggtcctacatgagttggtctccggtgtactctctaatctaacctcacctagtcctctttccactctgtctccaccccagtcactctggcctcttgttctttgagtacagacaaccacatttgcaataagacctttgcaccagtttctgttattgccctggaactttttccccacatacctacatgactgtctcctttccttcaggactctacccaagggtcttctcatcagaagctcttcttttgttaccattctaactgaaatagtacccctactgtcactgtttactccttaccctgctttgttcttagcaaattttgttattgtctgtcttctccctttctttgtaagctgtgttcaagcacggagtttgttttcttcgttgctgaatcattattggagtatatgcactccattgtttgttaaacaggtgaacacaagaattgccattatagggcaggtatagagtgctaaaggactgcatagtatggccacctaacccagacatggggtgtcttcaggaaagcctctgcaaaaaaaatgtatacacagagggcttaacggatgaaggagagttggaaaggtggggaaagtacaagttcatccaggggccgagagagggagctgagggcagaaaaggtgtgtgtgtgtgtgtgtgtgtgtgtgtgtgtgtgtgtgtttggtgggaatagaggtgtatatggcaaaagatgaagctggaatggggagggactagatctttggggctttataagctaagcctcattaaggtggttgctttagagaagagatcaaagggtactgggaactggaaatgggattggaaaaaggatgaaaggttttacttttatgtgggatgacatagttacaactctctcccccttcctccccacacaaacacattccatagtgtgtgataaaaagatatcattttaccagaggcagttttctcctggatccttaacacattaggaaatattttggatgagcatactagttgaaaatctgaaatggatataagacttttctgggaacttaaatttatgtaatgatgcttctcattgttaatatctgactttaatttcttttggtttgacttcttgccaacattacaactatgtcctttcttcaaaaaacagggtcttatgcttatgagtgaaactgacaaaacatgtgggtgagcagttctataaaaactctttttttttcagtaacatyttggagggtacaaagggctttcacataatcttatttgacacaacaatcctgtgaaacagatggtattatctctaattttcagatgagggaactgaggttgagagagatgaacctaattgtataatatcacatacaaaattgcatctctccctggtcttttggctctaaacctatttctcatcacatttttctgatctaaggctatgattattatttgaaagtctgctaccccttcttattgagtaaatattgtgttaagttctatgtaagatgccaaaactaagggcctgtctcgttttccaattgctatggtcttattaaagaaatgaggcatttcttattaagaaatgcttacctaaaataactgaagggctgagtcaaatctgtaatgtctagacaacttacagggtgctgcatgaaactcagaatattagagaagcttagtggagaaaagcctctaaagaaggtaataactgtgtccgaagaaacaaatagggataggatgtggaagttgaaatttattccagacagagaatgaaggaaatatgtaaagtgtacagaaaagagatttgtatggaatggagagtgttaaatgagaataactattgatacttcttttgtacttggataaaaattgtgcattgatgaattctgggtgtgtgtgtgtgtgtgtatgtgtgtatgtgtgtatgtgtagggttattcctgatttagctaataaatgtgatctttttggaaataatggtgaaagaaatacctagccgagttgcttggacttacaggttatttcctaatttagctaataaacatggtagttttggaaataatgctgaaagaaatactagcctagttgcttgaaactaggctaagtgctcaagatagtgaacacaggaagagaagtggtctaggaaaaagattaatgagttaactattaacatttatgtttacaattttttttttatcagagaggtctgctgaaatggagatggtgggtggcgaaactccttgtagatgtttttacaaactcacatttgaaatctaaataagttacatatctcttaagaaaatatcattcagtttttgcctgacatgatcaataagatgccacctttttctcagattagctagttttaaaaggtaaagaagcttcaaggcctagcttagagtttgagtccttcagcaatctctctctaattcacttcttcctaagtctgtgctgggaccctctcctgtgtgttctccatcaccgtatgtccctttattatgattatatattcatatatgccttcctttcatctaaaggctgtatctgtctttcccactgctgcatccccagggcccagaaatacgtatttgttgatggagtgatagaatgagtgaataactttgtgctgtcactgtttataactggttgatgatttggttgtctgaaagcatgctcagtgctctctcctttgactagcttttttgttttcatcctgtaatgtagaytgtgtggtaaaatattgagtctagtttcactgatgcaggtaatgtagagggcatcttttagtaatctttgcttcaagtgagaataatttgttgtgaaataagcctactaagctgcctacttggctgctgaatgattcttttacccctaaattagaacagtctggtctgcttaccagtaagatctttggcacatgtatttcaataaaatgagcccttgtcttatcttactagtagtgctgtgtgagttgtcctgagtcattcagtggtaattgagtgcctactatctatcagacactgttctcggtactttagatactacagggaacaaaaaataaccctgtcctccacgaacattgtacaagcagataacaataaacaacagtgagcatataaaaaaggaaattacatagtctgttagcagacaataatgctataactaaaaagaaaaggtagaaaggtagaacaggaaaggggaattaggagtacaagggtggggggaagatgaaattttaaatggataggccttattgagatgaattttgagcaaaagtgtgaagaagtagaggaattagacctggggatatctagaggaagagcattccaggcagaagaggaagtcagtgcaaaggtcctgaggcagactgcatgatatattggaactggagcaaggaggccagtgtggagctgagtaagagcaagggacagagacatagactatgaaatcagagacataattaggggcagtgtactggattaggtagggctttatctgccattgaaaggaattttgtgttttactcttagtaaaatagggagccttttgaggaaaggagtgccctgatctgagttttatttctaaagaaacactcttcccctgtgttgagaatagactgtagtaagtcccaaggatcaataggtgagttgcagaagcttgtgcttacaaattgtcaatccctgtgattgttttaagcaccctgtttaaatatggaataaatgggtttttttgttttgttttgttttttgccttttgataattgctttgaataggactgatagtagtaagagacgccagtctatagatatcgaagagttttttctacataggttctttctgattgttctgtgctttaaaaagtgggaggtggggaggaagagggcgggggcagtggtgctggtcttaacaattgggtattatccaagaagtataaatgaagctgtaaaatggggtgctgtctagagtactgaaaagcatttatgacagagttcttccttcttgctgtcacagtacattttactcacaggagtcacattgagaaatgtgatttgtgctctctatactttgattaaatttaaagaagaccaacttcacaagaaaagtgaaaaacaagatttgtatcagtccatgaaattgttttcagcttttagcctaataaagtccaacttaacttaattcctttgtaaagatgtgagaactagatagctttccaaccatactcaagtctaaccttccttaatttactttaatttactttacttaatttactttaggtgttatatacattgacaatattaggcatgtctttactaaaatgtaattgactatgctttccagaaacaaatactatagaaattatgtgactctccattaatgcctcttttggaatgtgcttcttaaaatgtgctcatttatattccttgccccccatcctgttcattatttttagaagttggtgcatcttccataaacaatcagcaactttgcatgatgcttgcttttgtcccctgttgtaagacttattttgaaaatctttctatatgggagttagaatgtaacaattggtggtcatggattggtctttgggcctcctggaaacaagtatagtgattaagttagttcctgcaagatgcttctgccataaataatgcctttcagtttatttcattgtagcttagtagtaatgcttgatagttattactatatagactgattaatcttataaacttacataatgttttggcagtctcaccctcgttctaaattttggtgataaaatggatgtggtctctgagggggaaaggatttgagagaaattacatagtggtaaactgttctaattaaaagctctttccctctctctctctctctctctgttgccatgcagtcagtggtcctctggctgcctaagatttcttaactcactggtaaccatttacacataatagctgtacttgaagttgctatggtttcattagtagttttgcctaacctttgtgaactggctcaggcctattagttaggactagtattatttttatttaaaaataagttatgtttgtctcttctccataaaattatttagaaaagttcaaagaataaccctcttattatccaatgtcaaaaaatataattatgtgcaaagtagtcttatatgaccgaaattagattctgtcttcctcagcttatgcatcaatttagggttaaaaaatacagtaactgtgattaggacagaatactgctatgttcttgccagcctgagaactttgttaagattaactttgatagtaaatacagtattgagaattaytaaggaaattattcagacatattgcttccctagttattgtgacrtttaaagagttttaaaaaggtcattcccttgatgtaaattttgtatcagctgaaagaattgttggaagaatatgtgctgtgattaagatcatggtctgtggggtcagttagttttagatccaactcctgacattactactctttttgaccttgagtagatggcttatccttattctgtctctatttccttgtcaatgaaatgggaacgctaatggacattatctcacagagttattgggaagagtacatgagacataatgagtacatggacataataaactgcttgctgcagtgctggacacagaataagtgctagttagtgcctttggttatgttgtgttgagattggaacatttcttaaaacgtttcagtctcatttacttattaattacatttagagtctactctttcctcaaggccgtataaacatgcaagttttaaaaatatgaaatgctaacatcttaaggttgcaactaggttaagtcctgttgatcttcatgaaattgagaactgaccatggcagccctaccaggaaattatgacagagaaaaaaattccattcctcttggaggacagaaagtaataaatatagtgtattagttgtgtgtgtaggtatataaagagaggtcacacacacacacgtttattcttataatatattaataatagatctaaattactgacctgctttcttccctccaaaattcataaaaaaatgaaaatagaaatgaaatcagcattctttatagctcagctgatatatattattacccaatctcaggaataggaatgattcttagacagtaaataaaacttacacttatttttaaaaattcagcctcttagccaggcacggtagctcactcctgtaatcccagcactttgggaggccrtggtgggtggatcacttgagatcaggagttcgagaccagcctggccaacatgatgaaaccccgcctctactaaaaatacaaaaattagccaggcatggtggcgagtacctgtaatcccagctactcgggaggctgaggcacgagaatcgcttaatcccaggaggtggaggttgcagtgagccgagcttgtgccactgcactccagcctgggcgacagagcaaggctctgtctcaagaaaaaaaaaaaaaatcagcctttttagaaccgatctactttctatgtttccatagctgtgtaatacagtaatgagtgggttaaggcattgtgtctagaatatgtgtggtgaacctgttggacttgaatgtaatcattccctaatcttaccacataaagatgggattaataaccagcaccacacctgtgaggagaaattctggaatgcctcatcttgcctccagataaaacatgttcctccttcctttaaggtaaatgcaggaatattgtcaatgaacaaaatcctttcactagtcattcctgaaaaagaattacagttggaaaataaaaaaaatactcctattttagaacctgtaatgtggaagacttataatgaggtgaaaatgtagcggtggatttaaaactacaagatacttaattatagccatgcagtaagttatactatatatttgtcatgcaagaataacatttgtaagaaaactgatactgacacatgtatctttctaatccctacctttgctgtttttgttttcttttctcttttattttttgtagagatggggtttccctgtgttacccaggctgatctcacactcctgcctcagcctcccaaagtgctaagattataggtgtgagccacaaagcttggcctggtttcttttttcttgagataacctggaaaaagatatgtcaagtaggaataagtatgtaaatgtttagaacagatggcaggtagttaaagttagaatagtaatgttgggaggctaaattgggaggatcacctgagaccaagagttagagcccagcctgagcaacatagtgagaccccatctctacaggaaaatttaaaaaaattagctgtgcgtggtggtgcacacctttagtcctagctactcggaaggctgaggtaggaggatcacttgagcccaggagtttgaggttgcagtgaattactatgattgctccactgcatgacagagcatgaccctgtctctaaaaaaaagaaaagtaaaagaatagcgatgttgaaaatgaggtaatgaggtgcccttccccccaaaaaatgagtagttgttagcttttagctgtcatcgtggtacagctaccattttaagggaagggtagccttcccttaaaaacttagaagtcgggccaggtgcggtggctcacgcttgtaatcccagcactttgggaggctgaggcggggggatcatgaggtcaggagatcaagaccatcttggccaacacggtgaaacctcgtctccactaaaaatacaaagattagccgggcatggtggtgggcacctggagtcccagcaactcgggaggctgaggcaggagaatggcgtgaacctgggaggcagaggttgtagtgagctgagattgcgccactgcactccagcctggcagtagagcgagactccatttcaaaaacaaaaacaaaaaccaaaaaaaccaaaaaacttataaaagtcttctgaagataagaactttcttaggggttctagattgttatgtaacttttcactaatttctaggtatctggtgacccatctcatgggggcagatctgaacaacattgtgaaatgtcagaagcttacagatgaccatgttcagttccttatctaccaaattctccgaggtctaaaggtacagataatacaagtaataattttttaaaatgaattctccctttctcccctccttttagggcttaaacaaacaagtaaacaacttttctaatggaaaattcaaacacataaaatcacaggtaaaggtcatatagtacagtaaactgccatgttcactcagtgacaacagttacygacatatggccaatcatgtttcttttgtatttcccaagccctggattattttaaagcaagtctagacattatataataccatccatagatacttcagtttgcatatctgaaagataaggactcttcattcttacatctaaacaataatttattgatgtaatctaatatctggtcagcgtaatgttgagattttcaaaaaatcctcaagaaagactaatttatttgttggaggggcagataaacagtgttttaaaattaaacccatctttgatatttagctgctttgagtccttattgagctccagagtgccaaccagaaaatagattaaaagctcaactgagtggagtcaatggctgtggaaattatagtaatggtaaatgtacacaatactgatagttacttatgctgatttctaatcttactattaacactagcagttcttactgattcatgaaaatgtgcagcaaatatgttatataatatgacaatagarggttggaggtaactttgacttttttctcttttgcagtatatacattcagctgacataattcacagggtatgtattgtgactttgattacattattttggggaagtggggtgagagtggaagaatggcatttagccaagatcctaatctaaactttagccattgaaatgttgattgattgcaactttactgtaggtttaagctgattaaagaaagaagatgtgtagtttttttctatgtaaggctaacttggactggatattgactgtaggatggakattgtcttttgatagctggatgaagtcttttatgtctggatcctcattattacctgtagggggagaattgatcatgcatcataaagttgatcctgtcttccctgtatttgcttcctaggacctaaaacctagtaatctagctgtgaatgaagactgtgagctgaaggtaaaatgaagagacagtattcattgtttgctttactttgagattatatgtttgactaagcaggcagactttcttagggagtagctttgtgagccatgactatctgaaattcgtattatttttattatcagactttgaaatttaaaccatttctgagtaagctaagtgacattgaaagtggcatcacttgtttttattttaacataaagttaaattataaatttgatatattagtcataataaaggaggataatagtcaaatatcaagtaagtaggcccaaagaggtgataactagattaaatacatttctaagaggagaaatggcagaaacccactcactcaaaataattcaaataaaaaataagtgaattaattgtttctaaakagcaagcagctctagaacttttgttccatttcatttttttaacttgaaaaaatgtctgtacattagaatgcaccatttcatttggcaaaattatatatccacttaactcacatttatgataaagaccatttctttttttttccttttttttgggatgcagtctcactctgttgcccagtctagagtgcagtggtgtgatcttggctcactgcaacctctgcctcccgggttcaagcgattctcctgcctcagcctcccgagtagctgggactacaggtgcacgccatcacacccggctaatttttgtatttttagtagagatgggatttcaccatgttggctaggatggtgtcgatctcctgacctcgtgatccacctgcctcggcctctcaaagtgctgggattgcaggtgtgagccattgctcccagccaagaacatttggattactttaaaaagtttatggccaggcgtggtggctcatgcctgtaatcccagcactttgggaggccaaggcgggtggattatgaggtcaggagatagagaccatcttggccaacacggtgaaacctcatctccactaaaaatacaaaaatttagttgggcatggtggcgggcacctggagtcccagctacttgagaggctgaggcaggagaatggcgtgaacctgggaggcagagcttgcagtgcgccgagatagtgccactgcaccccagcctgggcaacagagcaagactccgtctcaaaaaaaaaaaaaaaaaaaaaaaagtttattgtgtcccttcctagtcaatccctacccctccacccctaactctggctccaggcaactatggatctgcttctaacactatagattaggtttatcttttctggagtttcatgtaaatggaatcatatagtgtgtatttttgtgtgtctggcctttgcttggtgtaatgattcggtattgttgtgtgtgtcagtggtttcttcctttttattggtaatagtattttgttttatgaacataacagaatttttaaatctatccacctgctgatggacatttgcttgagtttgaggctgtgtaaagcaactgtgaatgtttatgtgcaaacctttgtatggacgtaagttctcattgcacttgattaaatacctgggagtgacatttttgttttgctttttgtaatttcattttaagttcttgctgtatatttaccatacattctaagtatggaccaggaaatctctttatgaaagtgctattttgttctcctttttaataaggcaacagaggtttgtttgttgttgttgttttgtttttttttccctgcctgtttctaagtcttagcagtttgtctgttcctcttctgccctttagattctggattttggactggctcggcacacagatgatgaaatgacaggctacgtggccactaggtggtacagggctcctgagatcatgctgaactggatgcattacaaccagacaggtattactcgccttggttatttagggccttatttaattccatgttggatgcatttgggattctcagaaatagagatggtgggagtgggaagaaatgtcttttcttccctcagtgatccttttaaagcctgcaagtaaaaatatttcacttcctcagatggggaagtggggttttatacacagcttttaaaccttgtgatttagcaattgggtttttatttatttagattttgaatatattctctgagtacttatacctaaagacaattagtccataattttaacccctcaatgttacttggaagaatctaccattctactaataagaaacttgcccctttttaaacagcttatttctcttaagtgtgttttgacttaccccacctttgaacagccctttagtcaggtgaagatcttagtaagctatttatttctgtaaaaatgagtatgattgttgagcctcagatgtcttaaatagtaatttgartatttcacccctagttacggtttcatttgttgccaagaattgtaacagtgacattgcatatacttttacttctttttaattttgccagttgatatttggtcagtgggatgcataatggccgagctgttgactggaagaacattgtttcctggtacagaccgtatcctttaaaaagttttggattcttgtttcttatctgtattccagtgtccatgggtgtatactccttttacttatctctagggaagactctcagtattttgcttttatagtctagataatgcattatgaggtctttcttcaaactgagtagcttgccttgccaagaaagaggcttcagtttacttttgtgagttggaaaaattcctcataagttgaaaaacccatcaagtctgtcttctttttgcaacagtcccttattaatcatcccacagcagttctgagacctgagcatactcatgagaaactccagatcccagtgacagttttagtcttcttgtataaacacttaatgagcacaagatgcccatttataaatgaagggcatcttgctgttatgtttatgtattaaaagggctatgtttggtacctgcagtgatatactgcttacttgttatgtttgttgtttgacaacaaatagtaaaagcaagaagtgaaaagcttaccatgtaatgtacttttgtttttccagcacaactttttcccagattgcagccaaaccctaatttactccaagacttactgtctagtttatggtttattatagcccctttattttagctcctttcctatctgcggtatgcttgtttcatggtttagtattaatrtcatgaaaaatgtggtctgttggaactctcatcagttctacttatggaagatgtttaggtgagaaagattgttaaaatatatgtctagaattagttttggggattttttctttttttaatagaattgagttaactagccttcaggtggttttggttaggcaatattagacatgctacctctgatctattatgcctagagatctaaaagccattttagtcccttacctaaataaactaattgagtttataaaccagaatgtcaattcacttgcttacagtttgggatatacttctgtaatggctatgatgttcatgatatctacccacgtgttctaactatcttctgctagagagaatgtactttcattatgaactgaaaaaacctctatttctcaggtaaagctgtttctttctctctgaatattaggattgataacagagttcagtctccctgtatttagcttaccttattactccctacctctggattttaaattagtttaatacctggtgtttctcctttgtcctttgtttcattcaccttatatctgtttctcagaaatttggtatatatatattacagtccaaggtaagagaattagggaaaattcatacttccccctttcctcaggtacatatctcagagtcccatccttgctttgtcctctagagtagctgctgtcctgatgctattctctgttccctgctccccttcctcttcttgtgtctgtatctccagctaccatttagtcagtcacagacctccatgccggtgtagacacacaaggtggcagagagggaaaggcagtataacatacaggttaagcacatgctctggagccagatttcctggatttagatcttagctcttttatttccagctatgtaactttgagtaagtttcctaacctctatttctctcagtttccttaaccgtaaaatgataataatcatacatactcacaaggttgtcgtaagaattcagccagaaaataactggaaagtactgagacgagcctgccagtaaatgttagccatcatgttcagtaatggccttgcaaaacagattaccccttcaccttctcacttaattgtctacctatgaatcattaatgttttgttttgtttttaattctgtgataggtaggaaaggatggaactccttggcagactagtgttagaaagttttcgaagcagtgtgagtcttgtacctttgtggtcctgtctcacagacacctgtctattccctgacccttttaaatgctaactttctgcctgtaggaaatcttccctttgtgcttaggtctttttcttctgtgagctttagataaacaacctagtgtttaaactttttaataagggattcattttttaatacatgagaattcatttcaaaattttggttttagttatttattttattctacttggctctttttcagacagatgttctctcctggattgtaaaagtcgaattcaaaggatttttatttgtaatatacttaacctttctcttgtaagttgccatctgtgtagatacagctttgattgcctgacaagaggaaaatgtttcccattatcttttcctgcctgaactatacggtcacttgtgttccagcatagtggttcttaaccctcatagtgtgtcagaatcactttgcagagcttttaaaaactctagatgcctggggaccaccccaaagactccattttgttgtcatgggtcaaagcacagtcttctagtttgcagctagtgttgagtacaactagagtttaacccagttgaattttagtttaatcttggctggtcttgaagatgttagtaatctctattcattttttttgaaaagtaccaatgagatcagaaagttaattagaaaacatctagttgaatcccctgtttttaatagatggggaaaccaagacccagagaatataatccaaagctacctgtcacataggccacaatttcttttccaatattctgttcttcgctgttcttctaatttgcagaactcctctttaaaaaacctttggagaatgtattggcctcataccctcttccttcagcctgaaagacatgcacctgtcayttatttatgatatttaaatgcaacctctagaacaggggtgtccaatcttctggcttccctgggccacattggaagaagaaatgtcctgggccacacataaaatacactaatgatagccgatgaacttaaaaaaaattgcaaaaaaaaaatctcgtaatgttttcagaaagtttacaaatttgtgatgggctgcatccaaagccctgggccacgtgcagcccgcaggccctgggttggaaaagcttgctctagaaggtactcattgtttgagtgtccagttttctccctgttttccttatttattgatcattttgcatttggaattggtggtttgggcttgtaagtaagaactgtgtactagaacttttgtggtattgcaaatgttttatatctgtgctatccaatgtggtggttataggcaccagctgcctgtggctaattattaagcaactgaaatgcagctagtggtgagcagtaacgttgtggagaaraaaaaaaagaaatgtagctagtttaacttggaaattgaattgaaaatatttttgtggttaaatgtatttaacataaaatttaccattttaacctttttttttttgagacagtcttgctttgttgcccacgctggagtgcagtggcatgatcttggctcactacaacctccgcctcccgggctcaagcgattctcctgcctcagcctcccaagtagctgggattataggtgtgtaccaccatgtaatttttgtatttttagtagagacagggtttcaccatgttagccaggctggtctcaaactcctggcctcaagtgatccgcccaccttagcctcccaaattgctagattacaggcgcgagccactgcacccggccccattttaaccattttaagtttacaattcagcggcattaattacattcatgatgtacaatcactactactacctatttccagaattttttcatcaccgcagatggaaacactcagcccgtgaaacagtaacttcccattctcccctctggtaacctctgttctttctgtctctgtggatttgcttattctagaaatttcatagaagtagaatcatattatactgtatttgtccttttgtttctggattatttcacttagtataatgttttcatggttcttccatgatgtagcatgtatcagaatactattccattgtaagtatttaatatatcccacattttgttgacctgttcatctgttagtagacagttgagttgtttttacctttggctattgtgaataatgctgcagtgaacattgtcatacaagcatctgtttgagtccctgcttttgattcttttggttatgtacctaggagtggaattgttgcatcatatggtaactctatgtttaactttctgaagagccaccaaactcttttccatagtgtctgcaccattttacatgcccaccagcaatgcatgaggattcctgtatctccaaacttgttctttttttttttttaatagtcacccaagtagttacaaagtggtatctcactgtggttttgatttgcatttctctcatgactaatgattttgagcatcttttcatctgcttattggccatttgtatgtcttctttggagaaatgtctattcaagtcttgcctattcttaattaggttgtttgtgtttttgttgttcagtggtggttctttatatatcttagacccttatcagatacatgatttgcaagtattttcacctattttgtgggttgtcttttcactttcttgataatgtcctttgatacataaaacatttttaattttgattaagttccaatttattttttttctgtccttgctcatgcttttttgatgtcatattttagactgtattgccaaattcaaggtcatgaataatttacccctatgttttctactaagagttttgtaactactaggaatataatagggtttagctcttatacttaggtctttgatccattttgaattaatttttatagatgatgtgaggtaggggcccaacttcattcttttgcatctggaagtccagttattctagcaccataaagagactattacttcccccatcgaatcaacatgataccctaggatttctcctttgttttttgtttctttcaccttttacctgtttcttagaaatttggtatatataattagcaatacacgtgtgggtttaattctggactctcagttctattctattggtttatatatctatccttatggcaataccacactgttttgatcactgtagctttatagtaagctttgaaatcaggaagtgtgagtcttccagctttgttcttctttttcaagattgctttgactattctgggtcccttgtaatttcatatgaatttaacaattggcatttctatttctgcaaaaaaaaggctttagaattttgatagggattgtgtcagatttttagatcactttaagtgatattgacatcttaaccactattaagtcatcctgttcatgaacaaaggatctctttccatttatttaagtctttatttttttttcagcagtgttttatagttttcagttgtaaagtattttaccttggttaaattttttcctatgtattttattatttttgctgcgattatagatggaaattctttggtgtgttcattgttgatatatagaaaccaaattaatttttgattgttgatcttacaccctgcaaatttgctcaatttatttattagctctagcagctttcttctagattctttgtgattttctatgtatagggttatgtcatctgcaaacagagatagttttatttcttcctttccaatttagatgcttttaattctttctcttgtctaatgtaatggctctgtctagaacttctgctacaatgctgaatagcaacagtgaaagtaggcatccttgtcttgttcctgtcttagggggaaagctttcagtctcttcccattgagtatgatgttagctgttggtttttcataaatgccctttatcatgttggggaagttctcttctttggtagtccatttcacattgctatgaaggaatacctgaaactaggtaatttatcaagaaaagaggtttatttggctcacagttgcatagctgtaaaagaagcattgtgccagcatctgtttctggtcaggacctcaggaagctttcacttatggtggtagggggaacaggcatgtcacatgtcaaaggagggagcaagagagatgccagactcttttaaacaaccagcatttgcatgaactgatagagcgagaactcactcattaatgtggggagggaaccaagccattcatgagggatccaagaccctaacaccttcaatcaggccccacctccaacattggggatcacatttcaacatacttggaggggacaaaacatccaaaccctatcaccttctgttcacagttttctgagtattttaatctgaattttaaatgccattaaaattttatttagattacattgaaacttaattacacatggctagtggtattggtttatgcatttttagatcccttcaagttatcttcctgttctacctttttcttgggttttgtaattagtctccttcttgaaagattattttggtactggttgttagtaattcctggatttcctttaaagatataagaaatactggggaggggacaagatggacaactagaaatagctgcaatcagaggcttccaacaagaagaacgaaaacggtgagtgaatcctgcaccggcaactgaggtattcaccttctctcaatgggactgactaggtggttggcatgacccatggagagtgaggaaaagcagggtggagcgacagcccacctgggagctgcaaagggcaaggggagctcccaccccaagccaagggaggtggtgagtgattgttctaccctgtccaggaaatcatgctttttccaaggatctgtgcaacctgtgattcaggagatccccctcatgagcacatgccaccagggccttgggtcccaagcacagagctgtgtaggttcttggtagccctttggctggagactacataagactactgagttccttgggggaggggttgctgtcatcactgcagctccagtctgctgttttcccctgctggtgctggagagactgggcggttgggacccagaaggaattccctacagtgcagaccctacagtggtggtggcacatcatggccagactgactctttaggctgaactctgactcatccccctacacggggcagggcctctctgcgggaatttcagcaactccagccaggggtttacagacagaattccaatctccctgggatggagcccctggtgggaggggtggccacagtctccacagatcagcagagttagtctttccccttgctggctctgaggaatccaggcagtctggatgagtgagatttcccccagtgcagcacaccccctccaccaaggggcagccagagtgcttcgttaggtgggcctgtgcctcttgactggatgagacccctccaacaggggtcgccagacaccttatgcaagagcattcccactggcatcaggttggtgcccctctgggacggagctcccagaggaaggaacaggcagccatctttgctgttctgcagtctccactggtgacacctccaggtacaggagggacccaggcaaagagtctggagtggacccccagcaaactgcagcagccctatggaagaggggcctgactgttaaaagcaaaacaaatggaaagcaacaacaacatcaacaaaaaggtccccaccaaaacccctccaaaggttagcagcctcaaagttcaaagctaggtaaagtcatgaagatgagaaagaatcaatgaaaaaacgctgaaaactcaaaaagccagagtgcttcttttcctccaaatgatcacarcacctctctggcaagggcatagatgtgggctgaggctgagatggatgaattgacagaagtagacttccgaaggtggataataatgaatttcactgagctaaaggagcatgttctaacccaatgcaaagaatctaagaaccatgataaaacattacaggagctgttaaccagaataaccagtttagaaaggaacataaatgatggagctgaaaaacacaacatgagaacttcataatgcaaccacaagtatcaatagccaaatagaccaagtggaggaaagaatttcagagcttgaagactatcttgctgacaagataagagaagaatgaaaggaaatgaacaaaacttttgagaactatgggattatttaaaaagactgaacctgcgaatgataggggtacctaaaagaattggggagaatggaaacaagttggaaaacacacttcaggatatcagccaggagaacttccccaacctagcaagacaggccagcattcaaatcaggaaatccctagagaaccccagtaagctaccccatgagaagatcaaccccaagatacataatcatcagattctccaaggttgaaatgaaggaaaaaatactaagggcagccagagagaaaggctaggtcacctacaaagggaagcccatcaggctaagagtggacctcagcaaaaaccctacaagccagaagagattcggggccaatattcaacattcttaaagaatttccaacccaaagtttcatatctggccaaactaagcttcatagtcaaagaagaaataaaatcctttttagacaagcaaatgctgagggaattcgtcaccaccaggcctgtcttgcaagagctcctgaaggaagcactaaatatggaaaggaaaaacttactggccactacagaaacacactgttttcttttaccagtaacactatgaagcagttacctcaacaagtctgcaaaataaccagctagcatcatgatgataggatcaaattcacacataaaaaatattaaccttaaatgtaagtgggctaaatgccccaattaaaaaacacagaacggcaagctggataaagaatcacgacccatcagtatgctgttgtattcaagagacccatctaacatgcaaagacatacaaaggctcagaataaagggatggaggaaaatttaccaagcaaatggaaagcagaaaaaagcaggggttgcaatcctattttctgacaaaacagactttgaaccagcaaatatcaaaaaagacaagggcattacatagtggtaaagggctcaattcaacaagaaaagctaactatcctaaatatatatgcacctaatacaggagcacccagatttataaaccaagttcttagagacctacacagagacttagactcccatacaataatagtgtgagactttaataccccactgtcaatattagacagatcatcaagcagaaaattaacaaggatattcaggacttgaactcagctctggacctgatagatagctacagaactctctatacagaaacaacagaatatacattcttcttagcagcacatcgcacttaggctaaaattgatcacataattggaagtaaaacactcctcagtaactgcaaaagaactgaaaatataacacacagcctctcacaccacagcacaatcaaattagaactaagattaagaaactcactcaaaaccacacaattacrtggaaattggacaacctgctcctgaatgactcctggataaataatgaaattaaggcggaaatcagaagttctttgaaaccaatgagaacaaagagaacataccagaatctctgggacacagctaaagcagtgttaagagggaagtttatagcactaaatgcccacatcaaaaagctagaaagatctcaaattgacaccctaacatcacaactaaaagaactagggaaccaagaccaaacaaaccctaaagctagcagaggacaagaaataaccaagatcagagtggaactgaaggagatagagacaggaaaaacccttccaaaaatatcagtgactcccaagatctggtattttgaaaaacataaaataaaataaaatagactcctagctagagtaatgaagaaagaagaatcaaatagacacaataaaaatgataaagggggtatcaccactgaccctgcagaaatatgaacaactatcagagaatactataaacacctctatgcaaataaactagaaaatctagaagaaatggatgaattcctggacacatatgacctcccaagactgaaccaggaaaacgttgaatctrccaataacaagttctcaaattgaggcagtaataaatagcctaccaagcaagaaaagcccaggaccagacagattacagccaaattctaccagaggtacaaagaagagctggtaccatttcttctgaaactattccaaacatacaaaaggagggactcccctataactcattttatgaggccagtattatcccaataccaaagcctgccagaaatacaacagaaaaagaaaacttaaggccaatatccctgatgaacatcgatgcaaaaatcctcagtaaaatactggcaaaccaaatccagcagcatgtcaaaagcttatccatccaccacggtcaagtcagcttcatccctgggatgcaaggctgttttaacatatgcaaatcaataaacataattgatcacataaacagaactaaaggcaaaaaccacatgattatctcaatggatgcagaaaaggcctttaataaaattcaacatcccttcatgttaaaaactctcagtaaactaggtgttgatggaacatacctcaaaataagccatgtaagacaaacccacagccagtatcttactgaataggcaaaagctggaagtattccccttcaaaactggcacaaggatgccctctttccctactcctattcaacatagtattggaaattctggccagggcaatcaggcaaaagaaagaaagaaagggtattcaaataggaagagaggaagtaaaactctrtttgcaggtgacatgatcctatatctagaaaaccttgttgtctcagcccaaaagcttcttaagctgataagcaacttcagcaaagtctcrggatacaaaatcaaagtgcaaaaatcacaactattcctatacaccaacagtaggcaagcagagagccaaatcatgaatgaactcttattcacaactgctaaaagagaataaaatacccagaactatagctattaataacaagggaagtgaaggacctcttcaaggagaactacaaaccactgctgaaggaaatcagagaggacacaaacaaatggaaaaacattctgtgctcatggataggaagaatcaatatcatgaaaatggccatattgcccaaagtaatttataaatttaatgctattcccattaaactactgttgacattcttcacagaattagaaaaaaactttaaaattcatatggaaccaaaaaagagtccatatagcccaaacaattctaagcaaaaagaacaaacctggaggcatcacactacctgacttcaaactatactacgaggctacagtaatcaaaacagcatggtactagtacaaaaacagaccaatggaacagaatagagatctcagaaataaaactgcacatctacaaccatctgatcttcaacaaacctgacaaaacgagcaatggggaaaggattccctatttaataaatggtgctgggagaactggctagccatgtgcagaaaattgaaactggaccccttccttacaccttatacaaaaattaactcaagatggattaaagacttaaatgtagaacccaaaacgataaaaaccctagaagaaaatctaggcaatatcattaaggacatagacatgggcaaaaatttcatgatgaaaacatcaaaagcaatggcaacaaaagcagaaactgacaaatgggcttctgcacagcaaaagaaactatcgtcagagtgaacagacaacctacagaatgggagacagtttttgcaatctatccatctgacaaaagtctaatatccagaatctacaaggaatttaaacaaatttacaaggaaaaaacccattaaaaagttggcaaagggccaggcacagtgactcatgcctgtaatcccagcactttgggaggctgaggcaggtggatcacgaggtcaggagatcgagatcatcctgactaatttggcgaaaccccatctctactaaaaatgcaaaaaattagccaggcatggtggtgtgcgcctgtagtcccagctactcaggaggctggggcaggagaatgacgtgaacccaggaggcggagctggcagtgagccgagatcacaccactgcactccagcctgggcgacagagcgagactccgtctcaaaaaaaaaaaaaaaatattggcaaaggacatgaacaaacacttctcaaaagaagacatttatacagccaacaaacatgaaaaaaagctcagtgtcactgaccattagagaaatgcaaatgaaaaccacaatgagatactgtctcatgctagtcagaatggtgattattaaaaagtcaagaaacaacagatgctggtgaggctatggagaaatatgaacacttttacaccgttggtaggaatgtaaattagttcaaccattgtggaagactggtgaaatcctcaaagacctagaaccagaaataacatttgacccagcaatcccattactgggtatatacccaaaggaatataaatcattctgttacaaagatacatgcatgtgtatgttgattgcagcagtattcagaatagcaaagacatggaatcaacccaaatgcccatcagtgatggactggataaaaaaacatggtacatatacaccatggaatactatacacccataaaaatgaatgagattgtgccctttgcggggacactgatggagcttgaagccattttcctcagaaagccaaacaccacatgttctcacaagtgggagctgaacaatgagaacacatggacacatggaggagaacaacacacgctggggcctgttggtggggtgggggtcaggcggagggaacgcatcaggataaatagctaaggcatgcggggcttaacacctaggtgatggattgataggtggagcaaaccacgatggcacatatttacctatgtaacaaacctgcacatcctgcacttgtatctcagaactttaatttaattttaaaaaaatataagaaatactcatttttgtcttaaagccaataatgtgttatcagattagaaattattcttgtttgtgactttgcagaacccttccatctggcctaatgatagcattattattttttaaagaatgaagccctttcttaaaagcctagttgactagggatatcaagtggacacagctgacagaactttgtactagaaaggagggaggatacagaatgtctcttcaggtacagtactaacttatttcaaataccatagatcttgaaatgaataagccactttgaaaattctgttaccaacgcttaacactctgcagcttaaggaagagagaaagttttatagccctgttatgcatcaaataccgtttttctaccagagatcacagccttggcttgctgttgttttccttttctccataatcaagtgaatttccttatgtgtaaaaccttctttaattttaacagaaatggtgctcttaagacataatgggttaatggagctgagttaaaatccacttgccatcagttactgccctggtctatgggagttttcctagtgtattaaatttgcttcttatatatttttttttatttcttcttttgcaaacatgttttgaaatatttcagacatactgctagacaaagaataataaacacctctgttcatactgtcctgcttgtgagttaaaacactggcaatagagctaaagcttctggagacccttctctcacatctgcccatcactttcagtcattggtttcaaatactctttctttttttttttgagatggagtctcactctgttgcctaggctggaatgcagtggcgcaatctcggctcactgcaacctccacctcctgaggctggtctagaactccagacctcaagtgatctgcccgccttggcctaccaaaatgttgggattacaggtgtggccactgcaccctgccaaatattctccctctctctctttttttttttttttggagacagagtctcgctctgtcgcccaggctggagtgcaatggcgcaatctctgctcactgcaacctccacctcccgtgttcaagcgattctccctgcctcagcctcccgagtagctgggattacaggtgcacgtcatcacgcccggctaatttttgtatttttagtagagacaggattttgccatgttggccagcctggatgttctctcatttttaaaaagcagtttcactttagacaccaaaagcaagtgtccaataaatgctgaagaagaaaaatattttattaggttatttgccctttcctctctaacttgaaaatacattttctcaggaaaaggtagaatcctcagatttgtccataaaccaagggtcccttaagaaattttctttgtgttacagtgaaaatgactattttgacaacttggaagataaggagctaggctaagtcttattctagtctatcctgtctgtcaccaggaagatttcctaccttcccaaaggttagtgctccacttcacccctatgtggatttatgtctttgaaaattactgctcatggcaggtaggtcctgcaattggtccttttatttatcttcaactttctggcctgtggaggttttttaggagtgcctggagcacttagaactgactagaatatccctcttttactttccctagaaatatcctgttatgcttagtttttttgtttttttttttctttacctgttcattctgactgacttgcttctgttaaagatgacttcgtctaaagagtaatcttaggcttaagttgttcttttcttcatttgttttagaaagattcaggagatttatgatttaaattttgacgttgtgatcattacaattaaaacacattttaaactaatagtaaaaatattttctacctaagagaaacagggctaaacctattacaaaggatggctcactgtggaaataactgattgtcatgatgtggtgagttttgctttactccgctaatgtggctacgtgacgctccttctggtcttaactgcctggacaaatcatagtggccttatagtagctggtactgttggaagactggcctgtatttcagtggatttgccagcttttgaagaacccatggtgatttcttctgaggtttgcatgttttaacttccttcatgcaaatgcttttagttactaagatttttattttatgttgtgtgtttttccatggagtatggtcattctgtgttttgagggcaaggcagtggggtaaagctgagttgaaaagcataatatggctcatcttttcttttcttttttttttttttttcattttttgctgcttttattttacgaaaaagctaattcaaatctacattaaactaagttgaatacaaagcctttgtgaagaaggcctggtagtctcatttacaaaaatggccagtgtcgtctttggccttaaaatttcaggacgggcacttcagatggcttcacatttgcatgtttcagtgctagagcatgggaatagactttggcatccactgtaagatgtttttcagctacgagagcatcgagtccctgcagcaggtcattcttgggtaacgaaatgacttccacaaattctccatcccctggctttggcttgggccttacattttctgcgtcatctccgttaatgattactgtcacgatgtgtgtggtacagtttgacaaacctgggtccatatagaccactggagaacattcagcagcgtcccctttgtagccagtttcttcctcaagctcccaaagagcagctgctcctggggtttcaccatcttctatgagttccctgcagggaactctatgcagtagccacccattggtggtcaggactgtttcaccagaacgatacactcgtagtgaagcgttctctgcagcacagggatgaccrctacatcatcaccagtctgttctttcctggttgtatgtttcactgagtcccaagttccagttttaccaataggagccatgtatgttgttttttcaagtttgacccattttccttctgaaattaactcctctgaaataatatagtgtttccattctgagacaattcagttggttcttggctctcccttttcaaactagtctttacagccctcaggagagaagttcacctccaaagtgtaggggtgacaaagggaagaggacaaaagaactactggaggcagcagtgtcagcatacgccggtgtcacgactcaagacatcggcacctcccgaggtgatgaaaggatgtgccatggctcatcttttcaagtcaactagtatttatcaagctgctctgtggaaggtgctggggacaggatggtacctgtccttaaaaccagaatgatcagactcagtggaaagagagttacaagagttacttgaacaactgtctctgattataaaataagatggagtgataaatacactagaatagagttatagataagctattgaaaaaaatccaagaagacttcatggcagagttcttgtttgaataggacttcaaagtgtaaataggaatagaaaaggcttggaaggacgggagaagggggaggtattctggtttatgagtacataaataagtacttggaagcttagaagtgcctggaatatctgatgtgagttgaagcattgagtgcattaaagaataataatttgagccagagtcaaactaggcttgattcttcaggcctgatattgtttcatgccagcagaggtgggagagagagggtttctcagctcattgatgtaatgagccactgtgactaatggaaattgcgtattcttcaggtaggttggggtgaagttcaggtagttgagaaattcacagctcagagagcctgtcttccttagagagagtataaaaattgactctcagccaggcacggtggctcacgcctgtaatcccagccctttgggaggccgaggcaggcggatcatgaggacaggagattgagaccattctggctaacatggtgaaaccccgtctctactaaaaatacaaaaaattagccgggtgtggtggcaggcgcctgtagtcccagctactctggaggctgaggcaggagaatggcgtgaacctgggaggtggaacttgcagtgagccgagatcgcgccactgcaccccagcctgggcgacagagcgagagactccgtctcaaaaaaaaaaaaaaaaaaaaaacaactgactctcattgttaagtagtcagaaagaagtctcttaaacaagagtaccaatatcaaaagcttcattttagagattacttttgatgcatatattgtaaagccacttgtttgagatttgaagtagtcaagatttttcccatatatgatttactttatcttgtggtggctacccagttaaatatattcctgaagagtgttaatgtgaggaaactaaattttttgaattgagtcattttagatgagcaagaattttttttactgatttctattgtaatataattaatctgattattttagagcaagacagtatccatcccacccccattcctactctgtcccatgaacatatgctataagattttttacttgtcaacatcttgaactgagaagccagtattaaaatcttaacctttataacacaatgatttttgccatttgcagatgacaaaattccctgttattcttaatttagaaataatgtgagtggacttgtttctagtttgtttttgcttgctaaagaacacaagttgtttgggtttagggtggggtttggcgcaccttttctgaaagggccaggtagttaatattttaggcttgggaaccatatggtaactgtgcttgttgtaattggaaacacctatagactgtacataaatgaatgggcatggctgtgttctaataaaactttatatataaaacaggcagagcctggggtttggtgactccagcctagaattttcttccatttaagctgatttcatgtctgaaagaaagtaaaagacaggatgtcaaattactgcattaagttattcctataacgtaggcacctgtggcttatagagactgttgtttttaagtgctgctatgttgcctttatatgtataaccataagcaaaaatttctttcatcctgctctaccttttcctcaaatattttgactacctgtcatgtaccagatgttaggctggggataaatggtgaagaggcagagtggcccctgtcctcgtagagctgtagaccagtacagggggcagacagtaagcaaataaagtaattctaggctgtgataagcactatgatgttatcaagcatggtgctgagagagaattggggggtggggtgttatgtatatagagtgttgaggggaggcctcccttaggaggtgaagttgaagctgagacctgaagccaagaggatttagtcatgtgaaaaacctgatgggtcagaagacagtcatcctccccttctccctccctggaatgtcagtcagtataaacgtggataaactgttcacattttcagaggaaatattaaaagctattttataatatttttccccctctttttaacttcctttttaggtaagattaaaagcaatgagaacaaacaaatttttgtcttctggttaacacatgcacatacattctgagtatacattgaagtgttagctaccaggataaaagttatggcattgtggcctattatttagagcctttgggatgtgtgaagtttgttaagcattgttcatttgcattttataaggttgaaaccgcctgtatttgcgttctcatggcgctcctaaaggaacatgcgrtgggagagcgccctctgctggcgactctccctcatagtgcctgctatagccagtgtgagaggcgaggcttccctttccagagggtgtgctccagtggtcaggctttggggtctcacaggccttccactgtcatatcacaagctctttaggtcacgcttgggagaatattcataaatagacttgtacatccctagctcctgtcttctgctgcttttttccttatctgtggccctctaattatcagtgcactttgctgaactggttactgacactgtgatggcagatgaagagggcagtgtaaactgagtgaagctcttgtgttttcacctgctgtctttggcagctaagaaccagctaaagttgcctcactttactgatacatgctgttgacagatgcataaaatgaatataaagtggatatgtgtttggtagcattttgaatctttgtacaggaggagcatgccctacgtgaagtgatcatcctgcaggagccttgacctagagggattcaccgtgttggctaggtttggggtgtttcatttttgttctcggtgtgttckgtttgtttgtttttgttttgtttgtcattgtttgtttttcatttttattttgtcccaacattttcctttatggtccaccattagatattgatcagttgaagctcattttaagactcgttggaaccccaggggctgagcttttgaagaaaatctcctcagagtctgtgagttgatgctttgtaattatctgccctgttgggagcctctgccacttgccttctaccaatctgtactttgacctgggtgtgtttgtaagcacacatgccctttgtgtgctgacttcccggatgagtgaggtataagacagtgtgagtgtgtgtgtgcgtgcacgcatgtgtgcctgcttgcatgcacaartgtgttttattctctatctgggtacacactaagatcacgggagcctccattagacaatagtatcccagtaaagcaatgagatttgagattctaattcattccaagagattaatgtaaactttgtgtctctgtcctcaagacctgactttcttctttctcagaagtttcacgtatgctctagagctcttttcactgtttctagtgtttgttctcagagcatgagcttcaccatgtatttagtttaacttaatcactaaaagaataaaatgtacattgtctgcacactgttgccccttcccagaagttattttttattgttttagaatagatactcacatatcctatgtaaaatgtttgttcccaacagagggacctttctacccagtccctagaccccactcagaagaaacagcttcactcctgatacctcagatacacaggaatgtggttataaattttcctcctattgccttgtaattataagttagataacctgagacagagtttggaactagtgctttcttgcttctaagcagggacttagacagaagccatgggaatgtgagtctggcttacttttgctatgatttcctgctcttggtcattttcttgggccagaggcatgagagaagccatgaaagcccagcttttctttttccctcgatctgctgccaggcagttgaacaaaagaaaaaaagagctatggagccaagctccagttatgccttcctggattctcctcccaacatttatgactgaaggggccctttgcctagttgggaagatggctgggtagcttgaggcaagcataagcaggtgagttggaaccgttcatcatcttcctgacaaaataaagaataccgtcatctggtatgtatccggtacatttcttgaaaggatcccaaagcccagtgtatttctgaacctccactctgaatttgtttcatttacttatttaagataaagaagcaaaagcccagaagggcagtgacttttccatgtcatgcactgaatcacgtggcagagctgagtatagatcccagatgttctgataacatgatccaaactataatcccatgtgattacacactattttgaaagtcattgtcagtgttaccacaatgtcaacctaaagaggtatttttttcycctttatgatatgtagaagctgaattagagtgaatcaaagatatcagatgatgcttagaaagagcagtactttttttttaatgtttttgcttagaaacactgtcttacagtaagaggacctaagggcagagggaggagctcaattaataaatagtgctaatgagaccaagcaaattcatttccttcctgagagtgtctcctagcagccctttcttagtcttctcttccatcccaaccatctgccctatagatacgtgctattagtcatttggaattggattaggaattcaaaccaaagtctaggtaaaatagtcaatagtatttatctgtcattaatccatcacttatttttaagaaagaaacaatgagtgcacagcctaataatggaggtctctctgtgaaatgaggcacattatacatttcaacagctctactgaaattgagtaccagaatacagaacttaactcaaataatattayattgagtataagaataagaaaggttttttttttttggtttgtttcctacataattggggtgagtggataaaagtagtttaaacatcctaaggggtagacaagattaatttgatgttcgtgacacggcccaagtacctgtttatcttaaaagcgcatgatgtatgggaacagaatggaaaaataaggccaggtgagtaaaattgttcagagattttaaaaattaaaaaaagaaaaaagacattagtgaaggagtgcagtaaatagccaasagctgttttcattctcctgaaaagtagtgaagtagtgatggcaataattatgaagaaattgaatgccgagtaagagaatgcagtaatggatttagaacctattagaatgagccataggaaaaggtataaatgggttgtgatggaggccaaggacagagaattcatttggttaatgtcccagtatctataataatcagtgaaagaacaagaaaatcatattaagaaagcaaaagcagactgggcacagtggctcacatttgtcatcacagcactttgggaggctgaggcaggaggatcactcgaggccaggagtttgaggctgcagggagtggtgatcatgcactgcactccagcctgggcaacagagcaagaccttgtctttaaaaataaataaactaattaattaaattagataaaaaagcgaagacctgactcattcacattttcctccagaaatagaatctttctaacttcttgacagaaaggggatataataacctctttgactaaaggagacaaagacagaaaatgtgcaggccaggtatcattcacagaaagaaagggraagtggaggatttttacattttaagacccaactggtattctgctattgctggtttactttgtggcccctttttgttatttcccttggcatgaaaagtatcatttgttatgtgatttgttaaaggtaactctaaattctgttatctgtactcctaacaaaataaagaattccatcatctggtatggatctgttaacgtttcttaaaaggaccgcaaatcaaagtgtatttcctatccccttttggaatttactggcctctgtctttgggcttagggagcgtaaaaggcagcgtggagcacatggctctagctccctccctgtggccagccttaaacagattactgctaagtcatctgaccactagggagttcagttcagaggacgagctaaagtagaaaaattatttgggaaagccatgaagtaaaattgcttggccatggtgcttattaaagatgacacttcacctgaatgagggaattagtagttaacaagaacaggactagaaaaggggtttattgaattacattgaatatttttaaaatctcatcacttctgctcttagtaggaacatgataaacagttctgacattttagaagagggtgagttgtattaacattgatggaacagttaaaagagagaagttgtagtacagcttacatatgtgcctatacatatagaaaatctcatagttctgcccttatcagatgcttgcagagtattctgcagacttccctccagctgtttgttaaatgaggttagtctgttcgctagttgaagagacttgtggaggaaatcatgtggcatgctttaacactctcagcagcctgtgacttctgttttgcctttgccattagcctctaaccttctcctcttctcctctttcttcatttaccattttgtgtttgtggcaagtattttaaatgtaccactaactaatgtctttgaaatgtggcattgcttattaacccagatgcccacgtgtgtcttaattcggagggatggtgccttggagaacctgtgccgcaaaagtttagtctcttccttgaatggatatgttggatattttattttgttcaaagttgagtcaaaatttttggaatcatctatatttctcccacaaacaggttttggccatcagtacttgaaaacagttctatggctggcatcctggatcaaggggcagtctgtttccagggaacctaaaatatttaacagtaaagatgatgctaaaaccaaagaaaagtaatttttcttatctgcatggccagtcactggctacgtgcctagttactcatgtcwttcacagaagtgtactgtagcatgcagctgtgggctctcgggtagggggaatggagggtaggtttttttgtctgtttgggggtggctttttgacctttttaaaaacttgagttgaaaattattttttgcactgtatgtttaacaatgcccttgactaggcatctaagatattaaccagcttcagcagattatgcgtctgacaggaacaccccccgcttatctcattaacaggatgccaagccaygaggtgagaacaaagagactgtacagggatgtcgcactgagaagccacattctcattttattgccaccgtataaccaacagttcttaacatcactggatgcttgcatgtgccttgaggcctgcctatgtgctattgcaagatgttgacttttgggataaaatgtcatccagtcctgtgagattgggaatataattagtaagcttgtaaatggaaaattgttatttttatatttggttgtgtgaatttagtgcttgtgaggcggtttctttctaggtgctctgcctgtagctagggtgtgctactatcgtgacctttatcagaagggtagttaactgaagtccattagcatgctttccaattcatccatttttttaatgaccaaaagaggattctttatttaaaaacaaaactgaaatatccaatactaatatgtactatatttaaaagaaaatacacaaataatatagaataaatacaaacactttggtacagttaggtaccttctttattaattattaactacttagtctaactcttgttttattatcagagatgattggggcacttctttctttgtaagatacccttaatattttggggaaccaggttggcatcacagagggcccttcccagcagctttgtttctacttcagctatattcaggtcgtcttttgatttatctttattaaagggatgactgttctctgaatgagatagttctctcttacctgttttcccttcctctttttatttacatgttcaagtagaaagggattacagccatttatgtattcaattcctaaaactttcttttcaaatcagaaagattctcaattgcttttcaaagcagacctttcctcctgactccacatgcaataattaagaagcggaaggctgggtgtggtggcgtgcacctgcaacctcagcactttggaaggctgagatgggaggatcagttgagcccaggagtttgagaccatcctgggcaacacagcaatactgcagctctacaaaaaaatttaaaaattagggcatgatagcacatgcctgtagtcccagctacttgggaagctgaggcaggagggttgcttgagtcaggagttagaggccatagtgagctgtgattgtgccagtgacctccagcctaggcaacagagcagagactgtgtctctaaaaaaatttttttaataaataaagaaggtgaacttgcccaagcaaccagatttttttttttttaagacaggatcttaactctgtcaccccagctggagtgcagtggcacgatcttagctcactggaacctccacctcctgggctcaagcttcctgggctccatctccctgctcaagcgatcctgttacctcagtctcccaagtagctgggaccacaggcatgcgtcaccacacctggctaattttttgtatttttggagacaagttttcaccrtgttacccaggctggtctcaaagtcctgggctcaagcgatctgcccaccttggcctcccaaagtgctgggattacaggcgtgagtcaccgtgcctgggcaaccagaactttttataaacttgtgtgtgtatgtgtaaacataaatatacatacatacttttactgttggactgtattaaaacaggagttttaaagaggtggttaagatagacagcagactttgcttctgaaggtgatagtgggatagcagataatgtttcttgaactgtcacttggaaccaagtactgtgttaagaaagtactaggtttgttatctctaatcttcactccaaccctgtgaggtaggactgttatattaagtttatattaacttttttgttaccaccgttactttgttagcaaggtttaatattgatatcctttgatgtactaagagcacctactgaagtcagcactgtcaaaagactgctggtccaagacttkctttgggaataccaacccctctaccaatttagctgtttgagaaggctgtctcagggctacttcttacatatcttggcctcagtttttaaacttctcatcctgtgatcagaaagctaatgaaagagaatttgattgatgagcattctcgttcacttgaaatgcaactgtgagagatagcaggaataaagaaggtgatgatcataactagggaagttaggatggcagtaagggagaagttctatcaaagacagttagaaacactgaagttagtggactttgtcagttaacactcgttccttagcaggaccaagattctttctttgagagcagtaacattattgaacaaagtcattctgaaaacccttgttttttcaggcaagaaactatattcagtctttgactcagatgccgaagatgaactttgcgaatgtatttattggtgccaatcccctgggtaagttgaccatatatcctcacctcatggatattgaattggttatgatataaattggggatttgaagaagagtttctccttttgaccaaataaagtaccattagttgaatcttggaaggtgataaatacggcttttattatctatttgtgttgtcagatttttttttaatcacatgagatgattgtatgtttaaatgatcacagaacttgggattgggggaatgggcaggtacagtggagaaakgagagaaagtaatgggaatgttgagagaaaagattggtgaggcaggaagaagcagatacagaagaaagctgtaasttgctcacaactgctgtggatttatggtgtctctgagtggaggacagaaaccactgaagtgcaggtgggtgtttagaggagccacccaggagctccctgcagggtgctctgctctaacggtagctgccgttgctacagatcctgtcgtcttccacactcatgaacttttcccctctcctcttctttctctgccctcagaggcataaccrtcctctcctgtttgtggagcttatttgctacctaaacttaaaggaatggcttcctatgccttcaagatccttggcagagggaagtgatggtggcagctgaagatatgtgttgccttggctaaaaaaggagttgctttattattattatttatttatttatttatttatttatttattttggtagtgtcagggtctcgctcttttacccaggctagagtacagtggcacaatcatagctcactgcaagcttgaactcctgggctccagtgatcctcctgcctcagccttccaaatagctaggactacaggcatgcatccccaagcctggctaattttttaaagaattctttgtagagacagggtctcaccatcttactaatcgtggactcctggactcatgcagtctgcccacttcaacttccaaaagtgctgggattcagacgtgagacactgtgcctggcggactatattctttgaaggggaggagtgatgtgtgcttcagatggcccctgaaagctgctttgcctgaggctcattccctgactcttgaagaggacagtggacagtgctgtttaatggtggacacagaaggatcagaccaggacctccctacaatagggaagggagctatgctatggtaacgagtataatctgccttctcacttttcttaagattgtattgtgtggtgtgttttaaaatctcactgcatttctttgcatctgtttgggtcatctgtcttcttaagggtcttggcagctatgcttcaggtttagttttatctttttgagggctgacagccatgctgacctctttagaagctggggtgaaggctaggtgattttacctttttaagtacttcatccatagtgattatggagaggaattttagtgtcgctgtgataattcttataatagcagagatactcacgctctttgaagttttgggcagttgtggatgagttcgtgtcagccttggagacagagagtatgtcatatctcagctgggtcgctctcctgccctaggatgaatccacagtctcatcaggggtgggtacgattctactgagactggcttaggtttgcatctgccctggcatgctctcattggctttgtgtgatttatttgagctgtattatctagttcaagggtctgtgagaagctctctttgagccttaagtactacaggatgttgggaaaagatgttgtgttctttctttcyttttttttttgagacagagtctcgctctgtcgtccaggttggagtgcagtggtgcgatctcggctcattgcaagctccacctcccggctttaagtgattcttctgcctcagcctcctgagtagctgggaatacaagtgtgtgccaccacacctggctaattttttgtatctttagtaaagacggggtttcaccgtgttagccaggatggtctcgatctcctgacctcgtgacctgcccgcctcggcctcccaaagtgctgggattacaggcatgagccactgcacccagcccgtcgtgttctttcttgtcgtcattctgttctgaagttgtttcattttataagccttaagttttgaacagggcagtactcactgacaccctcttaacagactcagaaagatgtgttaattcattttttagggggagaggggagatatttgtgttccagcagcttatttaggtcacatacctcctgataggtcttcccattctttgaaatcatgacattgaaacctccaaaagaactagataccactttgctaatgagttgaaaggaggctttggtccatctggtgctcagcactgtacttctcagcatttaaacgtgccttacagcccattgccaaacagtgatgtcatataatgaggctccccttgctgggcagatggagcacagtgttactatcacaagctcgtgcccagcatattaactgagcaggaacatgccagaaatataaatattaacagctctgttttgtcagccactgactttgtttcactgctattcccaaaacatgaattaaaacttaaattaccccttgatgttagtgtatgtatttatctgtcaagattttttttttttaagagatggcatctcactctgtcacccaggttagagtacagtggcacagtcacggttcatgataacctcgaactcttgtgtttaagtgatccttcctcttccctatcccaagtagctgagacaacaggcacataatgccatgcccagctaataagatctttgaggaaatttgttcttgcccctgaccttattggttataagaacatggtcctttttaccctaagggtaacagagacttgtcgtataatctgtgttcaattataaaatcaacagctgataaggtttctttttctaagaagagaagaccatcagaagaatatatatatatataatccaggcattcacctagtactgtaaagtgtaaacttatgaacttgaattgacacatgaatatttactttgtttctgtatccccttgaagcccatatttctccagtggattactctggaattcaagctgtaggacgggtgttttacagcctccaatatacacagcagtagatctctataggaagctgtcctcttcactactcacccccacaccctccacatttaaggagtaatttgcaaagtctcaaaagcctttttcaccacagtgataactggttatatggcagtatttattctcccaagtgccaccatgctgaaacacaaaaatactcatttgaaatatagagttagacaaattaccattttgtaaccccttatgaaataattgcttttgggaaggaaacccagtgaatgcagaaagccataagtgaaaagaatggatatttacttggtaccaaaatatcccgcagattacttgctttggtcaaaggggaaacatcttaacccagtgatcaattttagctcattagtagtgggacagatggccttaatgcactgtcacgtgcacagcatcacctgtatttttgctgaaaatgtttaacctgattcttaccaaaatttttgacctaacttccggtttttgggaagtacaggggatagtggaaagcagggtatagacacatgacagcaaaagaagcaaaatcagacacatcccgagaaacggtcattctcaggacaatcagagggtctctttagatcaaaatcaggaaagaacagggcttagactaagagagactaaagaaaaccagtcagttgcagtgcatggcccctaattgaatcctggtttcaacaaactagttctaaaagacaacgttggaataattggagaaatcttaacatgaactggattttagatgatatttagaaattatttgtcagagataataacagtattatgattatataggaagatgtcttcgtgttgaaatatttggggagggtaaagtgtcatgtctataattttattttaaaacagttcagaaaaaaatacatataaatacagaaatataaaaatgttaattgttgaatatgctaggcatatgagtgttcactttatcatagtttttacttttctgtttctgtatatttgaaatttttcatagtgaaatttttaaaaataaaattccctttgattttaataccatgtctcaccctcatcaccatgtaaaacccccagtttattcactgtttgaagatctgttgatgaatatttgatgttagtaaataaacagcttagggggacaaaaaaaaaacagccctgcctacctattgtaggttacttcagctgtaggctttgttttatacagtttgactacactggtagcagtttgacattgacggtccacaaaagcctgttcaaacagaatcccagtcatttaaaaaaattcttctttagtaacatattctttaaaaatacaaaatacaggaggagggtgagggttgagagataacctatcgggtacaatgttcactatttggttaatgggcacgctagaagcccagtccccatcagtccgtggtgagacccatgtaacaaatgtgcacatgtacccccaaatcaaaaataaaataaaaaaattttaaaacatagaaaatacagatacacacacacacacacacacatacacacataaaggagaagagggctaatatatcctagagtaggtattttggaggagagttctttgtttggatatgaagggtcaaaactatgtttgctcaataaggcatacttttttgtaacatgttaaaaactmttttccttcctgtctmtggtactgatagctgtcgacttgctggagaagatgcttgtattggactcagataagagaattacagcggcccaagcccttgcacatgcctactttgctcagtaccaygatcctgatgatgaaccagtggccgatccttatgatcagtcctttgaaagcagggacctccttatagatgagtggaaaagtaagtcctaagggtaggattaacatcttgaaccactaaccaaaagcggtgggaaaaataaaaactgaatggtcataaccaacttgctaaagcttgtagatgaggtctctaatgcagaatgaatatgttctctggtggaaactgttgtagacagtgatactctctggacctttgagatacttatgtctggtctgattttatgcacagcccctcacataggagttttgcatggagagttgaggttttcagagtcattgcatttacaacatctctctgagcttttacagttttacaattagtagaactggggcaaagagaatttatgtcttatcagttaacttagaactagttagggacatagccaggaatggaacccatgtatcctgtgtccagtcccatattctttccacaaaacacaagttcagaactctagttaaatcccaagagccaagaccatctgttgctgtagcttgtgagagtgctctttcattcttgagcacctccrtagagagcttaaaagaagaggcactcagcgatgaaaaacatgagaaaaaaaatggttcttttctatgtcccttgaacttctgtgtgataacgtgttccagtaggctattacatacaagctgtgaggtagcccatcaaaccactacctggacagagaggaaggatcttgagcttagaagtcagagtgcttgccagcaaagagaatagcctaaactctcacatcttacttttccttcccaatttctaggcctgacctatgatgaagtcatcagctttgtgccaccaccccttgaccaagaagagatggagtcctgagcacctggtttctgttctgttgatcccacttcactgtgaggggaaggccttttcacgggaactctccaaatattattcaagtgcctcttgttgcagagatttcctccatggtggaagggggtgtgcgtgcgtgtgcgtgcgtgttagtgtgtgtgcatgtgtgtgtctgtctttgtgggagggtaagacaatatgaacaaactatgatcacagtgactttacaggaggttgtggatgctccagggcagcctccaccttgctcttctttctgagagttggctcaggcagacaagagctgctgtccttttaggaatatgttcaatgcaaagtaaaaaaataygaattgtccccaatcccggtcatgcttttgccactttggcttctcctgtgaccccaccttgacggtggggcgtagacttgacaacatcccacagtggcacggagagaaggcccataccttctggttgcttcagrcctgacaccgtccctcagtgatacgtacagccaaaaaggaccaactggcttctgtgcactagcctgtgattaacttgcttagtatggttctcagatcttgacagtatatttgaaactgtaaatatgtttgtgccttaaaaggagagaagaaagtgtagatagttaaaagactgcagctgctgaagttctgagccgggcaagtcgagagggctgttggacagctgcttgtgggcccrgagtaatcaggcagccttcataggcggtcatgtgtgcatgtgagcacatgcgtatatgtgcgtctctctttctccctcacccccaggtgttgccatttctctgcttacccttcacctttggtgcagaggtttcttgaatatctgccccagtagtcagaagcaggttcttgatgtcatgtacttcctgtgtactctttatttctagcagagtgaggatgtgttttgcacgtcttgctatttgagcatgcacagctgcttgtcctgctctcttcaggaggccctggtgtcaggcaggtttgccagtgaagacttcttgggtagtttagatcccatgtcacctcagctgatattatggcaagtgatatcayctctcttcagccccyagtgctattctgtgttgaacacaattgatacttcaggtgcttttgatgtgaaaatcatgaaaagaggaacaggtggatgtatagcatttttattcatgccatctgttttcaaccaactatttttgaggaattatcatgggaaaagaccagggcttttcccaggaatatcccaaacttcggaaacaagttattctcttcactcccaataacyaatgctaagaaatgctgaaaatcaaagtaaaaaattaaagcccataaggccagaaactccttttgctgtctttctctaaatatgattactttaaaataaaaaagtaacaaggtgtcttttccactcctatggaaaagggtcttcttggcagcttaacattgacttcttggtttggggagaaataaattttgtttcagaattttgtatattgtaggaatcctttgagaatgtgattccttttgatggggagaaagggcaaattattttaatattttgtattttcaactttataaagataaaatatcctcaggggtggagaagtgtcgttttcataacttgctgaatttcaggcattttgttctacatgaggactcatatatttaagccttttgtgtaataagaaagtataaagtcacttccagtgttggctgtrtgacagaatcttgtatttgggccaaggtgtttccatttytcaatcagtgcagtgatacatgtactccagagggacagggtggaccccctgagtcaactggagcaagaaggaaggaggcagactgatggcgattccctctcacccgggactctccccctttcaaggaaagtgaacctttaaagtaaaggcctcatctcctttattgcagttcaaatcctyaccatccacagcaakatgaattttatcagccatgtttggttgtaaatgctcgtgtgatttcctacagaaatactgctctgaatattttgtaataaaggtctttgcacatgtgaccacatacgtgttaggaggctgcatgctctggaagcctggactctaagctggagctcttggaagagctcttcggtttctgagcataatgctcccatctcctgatttctctgaacagaaaacaaaagagagaatgagggaaattgctattttatttgtawtcatgaacttggctgtaatcagttatgccgtataggatgtcagacaataccactggttaaaataaagcctatttttcaaatttagtgagtttctcaagtttattatatttttctcttgtttttatttaatgcacaatatggcattatatcaatatcctttaaactgtgacctggcatacttgtctgacagatcttaatactactcctaacatttagaaaatgttgataaagcttcttagttgtacattttttggtgaagagtatccaggtctttgctgtggatgggtaaagcaaagagcaaatgaacgaagtattaagcattggggcctgtcttatctacactcgagtgtaagagtggccgaaatgacagggctcagcagactgtggcctgagggccaaatctggcccaccacctgtttggtgtagcctgctaagaatggcttttacatttttaaatggttgggaaagaaaaaaaaaagaagtagtagattttgtagcatgtgatgtaagtaatgtaaaacttaaattccagtatccataaataaagttttatgagaacagagccgcactcatctgtttatgtattgtctgtggctgcttttgtgctacagtgacagaggcaaatagttgcagcagagactataggacctccaaaatgtcaaccatttaccatctggccctttagagaagtctgctgacccttggcccagggctacagttttctcatctataaagtgaagttcaggtttttttcatctttgacatttgagactatctataagccatatatttttattataaaactgccagagagaaggtttggtttgtatatataggtgtacattgtttgtaagcttttaggcgaatgtattttatgactctgttttgtcttagctggctacggtccttgaaaatattcttcagaatgactgaattgcatcacgggatgaaagagccacggggtctcacagctgagttctcagggactttgctgatgtgcttcctttcttggtgtccttggaatgacacccagcaggtgtcccagggtggattgtggggctcagcctgtgaggatattgagagctgggtttttgtccaggccctggctggcagctgggaatgaaggcagtgatcgaaggcagaccaagcatagtctcctttccatccccagtgacttcgtaaggaggtgagagaaaagggccccggttgttacatggggtcctttagctcctgttaagaatcagacagttggccgggcgtggtggctcacgcctgtaatctcagcactttgggaggctgaggcgggcagatcacgaggtcaggagatcgagaccatcctggctaacacggtgaaaccccgtctctactaaaaatacaaaaaattagctgggcgtggtggtgcatgcctgtaatcccagctattcaggaggctgaggcgggagaatggtatgaaccagggaggcggaacttgcagtgagccaagatcatgccactgcactccagcctgggtgacagagtgagactccgtctcaaaaaaaaaaaaagaatcagaccgttgtagggagtattttgccttcacataccagacatgagacatgagagcagccttcctcctaggcttctgagaagagggcctgcttagcccaaagagagctgacaccacaaaaagctcccctgaagtgaatccacttaaaacggggaccaaaatttcatatgtggtggacactgggggataggggaaacctgaatggaactttaatcatgaaaatggaacaaaatgacaaaagcatgttcataattttaaagatatattaattctgacaaggaaattaagttgtttttgaagtgaaactgattttgtatcttacaataattttctcatttgatttttgcaacgtgatcatagaaggaagttttgcaaaaatatttgagggcttcatcagttttcagaaggcctcttgatattttgatattcacattcttttttataagtatctatcggtgatcacctcctcaactttccttttattgttaactggtctgagtctgtcacccacacttttcagagcttttgcttaaggtttgagcagttttctagcattatttatcaacttcatcaaatccaccaccatttgcaagatttgtgattattgcaattaagttgcattctatttgtgtcatttgtcatatgcttacagtataaccatagagactaacagaagaccagaatacagtgggcaggataaatacattggcttcaggtacttaagaagcaaagagggactaactttttataaatagctcattagtgaatgttttcacattgggatgactttcacttctctatataatttggtagctgcaaggacttggttaatgaatatgcaaataataaagacccccttttatttataatgcagatatgttttaataatgtacatgccctttgaacttagcatttacacttctcagaagtcttcagcctgagcaacatagctggggactcttgactctacattagccaggtgtggtggtgcatgccttgtagtcccagctgcttgggaggctgaggtgggaggatctcttgagcccaggagttcaaggctgcagtgagtcatggttgtgccactgcattccagcctgggtgacatagtgagaccctgtctcataaaaaaaaaaaaaaaaaaaaaaaaaggtcttaagtgcacaaagtagaatgtttttcagtgtcacattctttgtacagcaaaatactggaagtaacccacatatctatgaataaggacttgattgaataagatggtcatctgtgcagtggaataccatccagctaggcatggatagatgtgcaacatacattgtgaaggagaaaaagtcagtggcaaactgtagtatcctagcccccttttttgttgataggtaatgcctggctaggaaatgaatatacattgaactgttagcaaccatctctaggcagtgggattgtgccctttaatttttatgctatttctgtaatgtgtacctttttttacactgagagttttgttttgtgatcagaagaaaccttttctttctttgttttgttttttaatgagaaaggtgtttaaaagtctatgtgacctggggaaccattctcaaatttcagttttgccagggctagagcccagcctttcaaggcaggagaacagttgctggaaagaaattgcacccagctgttaggcctctggcaagcaaagccgcaccagtactttgtagcggcattctccacccagctgggagggtttggttgtttcttcttcagtagaagggtgtattttaaggatcttaagcaggatttttcaattttggcactattggcatctcagaccagataattatttgttgtggaagctgtcctgtgcagtgtagggtgttaggcagcatccctggcctctacccactaatgccagtagcactcatgctcccttcccccagttgggatagccagagatgtctccagatgttgttgccaaatggcttctggggaacaaaatcatccctggttgaaaaccatgaatctaacacttcatccctcctaatcttgcagaacaccaaagcctcttttcttgaaaaaagagttaacacccactggcctgttgtaacttaaagaagtagtttggtggccgggcacggtggctcatgcctgtaatcccagcactttgggaggccgaggtgggcggatcacctgaggtcaggagttcaaaaccagcctggccaacatggcaaaaccctgtctctactaaaaatacaaaaaattagccgggcttggtggtgggcacctgtaatcccagctacttgggaggctgaggcaggagaatcgcttgaacctgggaggcggaggttgcagtgagccaagatgacaccgcagcactccagcctgggcaacaagagtggaactctgtttaaaaaaaaaaaaaaaaagtagcttggcatcttggaggaaaagtacaaattggaaaggcctttttagactcaaatacatatttttaggggaaatatgtttggtactgaataaaggtcatttcatttcttaaaaaaaaacagtaggttgagtaaattaagttatcctttgttcagaagttctttgccattatccacaggcagaaaatctggtaattaaactgggggtatgactacaagattttcttagaccagtaaggaaataacaaatctcaatgtgcctggtgtgttatcgacactcaagatactggttagtctgcatctcacgagttgacagggggcatcgaggctgtcttgttagggggagtttgcagccttctgcatctgggaacagtgtgtgtctctaaagccaactggggagagagcttctgaggacaaatggtcctgaggcagtttctggaaaacccattattgaagccataggctgtggtctaagtacgcatagccagtgggataatgttatattgcagagttatttgagtagttcaatttaaggaaggtgctttgtttagaagttattataagttaaataaggaagtaaccttcagtttgcaactaaaaatagaaactgtgccaccaccatttgagtgtcagttgcagcagaaaagaagaaggtgtaaaaccacagacccagcctagattcttaacaaaaaccagtggttctaaactcttgtcagatctattaccctttgcataactaatattttataatacctcttttataatgctgaggtgaaattcatagataattcacacaatttcaaagaaaatataatgatccaatataaatgacaaaggaaaaatacgaatacatttccatatataagtgctggctgggcatggtggctcgcacctgtaatcccggcactttgggaggctgaggcgggcagaacacttgaggtcaggagtttaggatgagcctggccaacatggagaaacccgtctctacagaaaatttttaaaacgttaactggggcggggcgcagtggcttacacctgtaatcacagcactttgggaggctgaggcaagtggatcactcgccatcctggccaacatggtgaaaccccatctctactaaaaatacgaaattagtacaagatagaaaaattagtcagctgtggtggcacccacctgggtcccagctactcaggaggctgaggcgggaaaattgcttgaacctgggaggtggatcttgcagtaagctgagatcatgccactgcactccagcctgggcaacagagggagactccgtctcaaaaaaaaaaaaaaaaatgaaaaaataaaaagttatctgggcatggtggcacacacctgtagtcccagctactgaggaggctgaggcaggaagattgcttaagccatggaggttgaggctgcagtgagccatgatcattccactgcactccagcctgggtgacagagtgagaccctgtctaaaaaaaaataaaaagtaaattctcaggcatagctacataaaagaaataatgaagtagttagatgcttgtacctatacatagaatcaccttgaatatgacagctccaaatgcgtactgatacagttgtgttgtcttgacaactcagataccatggctgactgctgtcagtcatgatttttctgaaagtggtaagcaactcttggtaaaaatttcaaacaaacaattagaatctttttttttttttggacagggtctcagtctgttgcccagcctggagaacttttttatttactcagttgtgatcctgggaaatgtaagtatattaatatgcagaaaagtatttgtttgatatgtaaaaccaagttacagtctaggctcagataatcataaatagttttttccaccttcatgaatgtccagcaggatgtttgtaatgtgaagcaattcttgttaagaatcccactctgcacagtggcccgtgcatgctcatatcagtaatactcctgatcagtatgataaccaaaaatggccccagagatttcagtgcacccgctgagaactgctgacagatcaaatgactctgggacacctggagtcctaagaagtgaaacctccacaatgcaggacagacctggctccctatggtcttccttccttccttcacctccttccccctactttccttacctccctactaaaaagtagttcttttaatgaactgctactgtatgttaggcaatttacattcttgcatattctatacaagtaatgtctctttctcagtcacgttacaactgaggctagattcaacagactatcctgatatcaacgttgaaagactcctggttccaaagagttttatagcattggtgttagacaatcctcttttggtttttttaaagaaaatttaaaaaaattaattcagcataatttccataaggactccctggctgctgctggccaaattggggaggagtccctggcagccacagccaggcactggtgccttatcttgttcagcacacactgggtctctctccctagttccaggccccttgccctcgcttctctactcatctgggatagaaatgcacctccaggcctctgaagagaaactaccttttccc

SEQ ID NO: 96782 - DNA, 174589 bp, Homo sapiens
  misc_feature (1)...(174589): n = A,T,C or G
gaacctgggggcatcctgaaggaggtgcccagtgggcagttgctttgtgctgggcccagggccaggttatacgtactttgaatattttatcttcatagctatcccatttggtgaggctcaaagagcgaaaatgacattcctggtaaatggccctgctgcagtttgaatttgtatccatctgactccaggtcacgtaagctctttttgtttttgagacggagtctcgccctgtagcccaggctggagtgcaatggcgggatctcagcttactgcaacttccacctgccaggttcaagcgattctcctgcctcagcctcccttgtagctgggattacaggcacgtgccaccacgcccagctaatcctttgtatctttagtagagacggggtttcaccatgttggccaggctgttctcgaacccctgaccttgtgatccgccctcctcggcctcccaaagtgctgggattacaggcatgagccactgagcctggtcataaggtctcttatacttttatttatttatttattggagccagagtctcactctgtcacccaggctgaagtgcaatggcatgaacatggctcactgcagcctccacatcctgggctcaagcgatcctcccacctcagcctgccaagtagctgggactatgggtgcgaatcatacaccaccatgccaggataatttgtttgtttgtttgtttgtttttttaaatggagtttcgccttgtggaccagggtggagtgaaatggcgcgatctcagctcactgcaacctcagcctcttgggttcaagcgattctcctgcctcagccccccgaatagctgggattacaggtgtgtgccaccacatccggctaattttgtatttttagtagagacggggtttcaccacattggtcaggctggtctcaaactcctgacctcatgtgacccacctgccttggcctcccaaagtgctgggattacagatgtgagccacagcgcctggcctactttttgtattttttgtagagacaaggtttagccatattgcccaggctggtcttgaactcctgggctcaagcgatccgtctgcctcagccttccaaagtgctgggactaaaggcgtgcaccactgtacctggcctcttatgctttgtaaagcattgtctggcaccaaaggctgtttgttcctcaaacatcttgaatcctttttgggaggatctgagttttgtacaactcatttggtccgttattgaaaccacaattctgtctgatggagacacaggcttggagaggagaggaggggatagatcaggcatcatgaaatgtttctggagcactcactctgagcttcacggtctgggcttgttcactggaggtcagagagtatatgtccttagtcttgttggaagtgactgtccaactggatgagaccagatttagaagccattagttactaccaggactcagggaaaaatggctgcctgtaggggtgggaagactaccaggaggaggagtcttctaaacaggatgaatggagtctgcccaggggaaaaggcagagtgactggcatgagcataggctggacaggatgtggcttgtcctggcactgggcagttgggggaagtgagagcaggagggcagggattagtggccaccataccaagcttcagaaggaggtttaagaagaagaaaacttaaaggtggatgcttgagtccttcgggctggggctgggcgtacaggctcaggttagcgacaggacctggtatttggggcaggaaggagactgctggagggctgcctggtctcagatgtggtcaggccttccttgatcttaagttgaaaactgattcaattttggggaaatccgtgggtggggagaggaaggaaacagctcctagacccatcagaaggcatggtcctggtgttcaccagctatgttcaggattaattaccaaaggcctccatgcctctcccaagacctaactgtttagtcagaaggcagatgctgttcctgttcagtgggaacaaggagctggaactaggatgggagtttgtctctgggcaagtcatgcttcctttctagaagatggggataacaataatacccatctcagaggagtaaatgagtatcctgcagggtagctggaacagaggaggataagctacaactgttattgtaacaacaggcagagcccttgctggagttgtgtttctaggggaggaaccagtgtcttctggacacagaagagtgagctttctactgctcagatgccatcacgtcattatcctcctccctcaccttccatggctgcttactgccttccagataaagcttcaactctttaacttaaccaaccaagccctgaagggtgaggctctgtgtctgccccatccttggttgagcctctttctgcactcattacctctgccccggcacatacactagacatgcttgttgtggtcagttcctctgaagcctggtgtttctctggactctgctggaatctctgcctcttccccttcttgcctggctattcctgaatatcctccaggactctctctggatgttgcttcctcaaggatacccctgagttagtttcaagggcattctcagcttctccagcacccttggcttctctctcagtactcagttctctgccttgttattacctgtctgctttttccacaaggctgtgacggggagccccaaaatatttatggaattaatgaatgaaaaggggtggttctaagaaaaaagagatcactgtacattggccaaatgtcccaacaggtatctattatatctcaccagggtaggaattatcagtaaccaagatttacagatgaggaaactcagcccaaggtagagtccctctgcctgtcattcaaatttctgggcacctgtgtgtaagcaccatgctgggcttttcacaggcagtatgtgtagggtggacaggctgagagcaagcacgtgaggcccatcataccaggtgagagttaaggtgctgacaccttgcatgagggcttagtctcttggacctcaattcttcgtagggctggtgaagggtcataggaacgactgtatgtgaagtgcccaggacagtgtccagtacactagtacagacccagcaagtgtttactgattcttatctcagtcctaaggatgggagtcacaggcccagaaaaggtccctggattgagacaaccagccagaggagagctgagtgtacatcccaggcccccaccctacagggacacagtcctctcccttctgcccccactcaaggagtcagtgtccttgtgagaatctatggcgctgtggatcttctcaacctagtgctggcacacatgagatgcttggccagggcctgccagatggggaggctggagatgggtcggctgtgattgagacctctgtggccaagttttactctaagaggcaggtaaggccctcaggggttatcccagagaagtctgagaggttttccctggggtcctggtcttctcccccagacctgtcagcaagcagttcatccccagctgccaatctccttttggccctcagtcttccagaggagctgggaggtgggagagaggggttctgcagggcagtgttgttcagaggtgagctttggaagaaactgttgtctcaaccctattttcacaccatagcacctttatttaactgtcttttcccgaggccaggatctcatcttttgtttccccagcactcagcacactgcctggaatgcaggaaatggttgctgaatgaagcgatgaattacatttcagcactcatcaagtgctcagcctataactaagtctgagtgtaggctgctaacacttagacctttaccttacagaatcttcgcagccagtgctgtgcattggaagttgcagatggggaaactgaggctcaggactgttaagtgactagttcaaggcaggtctcaggccctcaggatggttagtggcaaagtaaaggactgggaggagcattgatgaattggggcaattggcagaggagtaactgtcagtcaaaatgattggctcaaattattaggtgtgaagaaggaaccagtcagagcttgcctgttgagtcgaattgcccagatgggattagcagggtgagtgaccctagcagaacaaagagctggcccttgtaggtatagactcgacttttctctggttggtcccaacacatagacaactaccaacctgactttgcacctgagaatcttcagggtacctcagactcttcaacagaaggagcctccctgaggtcacagccctctcatcagtcccgttccagtgggcactttccctctaacaaagcccacttgctgtcttggcagggtctgcatccggcacttgcagacatgtgctaagggcctgttgacttgggagcctccatcactggactgtgggccttggagagcaaaagggtaagagcatctcgagctccacgcctgctgggccagtcgctggctgaaggcaggggaaggatggagtttagctggccagcactaatgtcacacagggcaacgccaaaaatggcctttctcccaggtgggctcaaagttaacagaaggcagtgagtaaacagtccactggggcaataactatgcacatttactaagccatgggaagaatagtagtcacgtggccctcgagggcggtgccctcagcttgagatggagttaactccaaatctaatcacagaaggctttctggaggaggcggaatttttatggcggccggatccggctttctctgaacagcgagaaggcgcttagcgccctagggaccaggtaactcctgaggtgagcttcttggtggggatcaagcccagggggcgacggagtccgggctgggggaagggcccgaggggctggagtcgcaagttcaggcccagcttgggctccctgtcccgcccttccgctgtcttgggggattggacgccacgcggtcgtgctagattcggtgctgcgggcccggtgcaggatgcaggccgtgaggccccaggccgagggctgcgccagcgggcttgtcccggccagccgggcggtcccgtgtcccggcgcagctccgctggggtccagatgcccggccctcaggggcgaggcgcgcactccccggggaaccgggctgcggagcaggcggcccgctctgggcggcggtggcacgagagggccatctgcctgggtgccgagaactgcagcgtccgcggtgcgaggcgcggcccgtcccgtcccggcccccagcccggcgcgcacgcacatacccacgccggccggcgcccgctgcccgagcccccgtgccaggcccagaccttgactaggcgcgggaggcggtgcagggactagaggaccccctcccccggcgttcccctcgccccgcccgaggctgcgaggacccctgggctcgggggtggtgagggagcttcgtcccggctgggcccgggctggggactcggcctccctgggcgggggccgcacggctgcaggccgaggtgcggacgcgctgtcaggctgcagcccggctcggtgccgggggtgggctcagcgctggggtcgcctggcttcgttcccccgcggaggccacggccgggcgagcagtgccggggcgggtaacccgacccggctccccagagccgctcaccccgcacggcccggcaaggggagggagagggatggggggagggggaagggaaggggtggtgggtgaggggctgtgggcaccgcagggccgagtccccggcccgtctgcgctgctgtagggcggctgcccgcggcacccgggacgatccagcctctgcctcgcgggcgtcgagcctgagacaggagggagccctggggctgcacaggcttggctcagggaggcagacccgagctgctgcctccattttgtttcctgctcagcttggtctgtggtggtggtggtggtggtggtgtgggtttggggtgcggccgggtagggggttcgcctgcggccgcgtctgctcggggcctgaggcctcgaagaccccagcccaagcccccaggtgagccctgcggcaggaggggggttgccttggcctcgggccgaacccagcgggctgagggcaggtgcccagtggatggggagcctgggctgtaacctaagatggaggccgggactgacgcgggcccgagcagggctggcgggacgatcggacaggcctcagccgcgccaggtgccgcctgggttggggttcgagacgcgtagggtgcgggagccgtgtgcggcccgaggccagcgccgtgccccgaggtaggtgaggggatcggaatgccacccacgacgcccgcaggccccgacactccaaggaggcgcgcgaggcccctggggagcccgcctcaggccccgcccgggcagccgggccggcccgtaggccccggccgcgagcgggcgcgcagggggaggggagggggcggcagcggcagctccgctgattgggcggcgctctcacaagcccgacttcacccgccctgaaccccgaagagtgagagaagggaacgcgcgcgctcggtgggggaaggggtgcgcgcgcactcggggcccagccgcacgcgggccggcgcgaggcgctcggtcgcacgcgcggccgcgggggcgcgcgcggtgggggtgtgaggaggaggaggcggcggcggaataggccggggcaggtcgcgctcgctgccttctcccctgaagagagacgcggggggaggggggtgcggcgagcggccccgctctctccccaccgctccgctcgcaccccagtgtaatgagggtcaccccctccccccagctggcccgggagggggcgcggggcacggtaactagtgcgctggggtgggcggcgggcaggcgcgaggagaagggagggaggagggtggccgggcggggaagatggtggtggccgtaaggtgaggggctcgggggagggccaggcgcgatgcggggttggtggccggcggcgctgcagccgccggcctcctccccctccccctcctccatcactaccagccgggctcaggcctagctggccgggctgccgcgaacttcctcccggcgcggcccgtgccccgccggccgcctgcgaacacctcggcctccgcctcccctcaggtagcaggctgcggggcgcggggccggctgccctcccgcagcaaactttgcttgctgctgaatattgatgagagcgatcggctcggctgggaggtgctgccgcggctgcgggaaggagcgcggcccgggcaggcggcggcggcgtcggcagcagccatgtttttcgagctgtagcagctgctgctaccctgactgggcttcgctggccgcctcggtttctccctctgccgggtccaggcctcttcgccctgcagctgcggatccagcaggcctgcattcaggaaggcgagctctggggtgcagccgcctcggccggctcgcctgcggcctgcgcaccgccgctgcaaaggctccggcgctggctgggcgcagggtgcagcgctattgtgaccgctgcgccctagcgagccaggaaggggggggtacctttttgtgcagggtccaggagcccccctcggaccccgcagccttttgcttttgagagatccagctgctcgacccctggcgagggagggggaggactagtcctgtttgagaattgggaattttgacgggcagaggggttttaattttagttcatcccaagtgtccaccagtctacagaggaggaaaaagagacgggctgtttctatgtagcaggatcggcccagcttcgggaaaatggagttttcagaggctcatcgaggccattttttcatctccagtcgggggaactttttctgcccatggaagtgcagcagaaaggcatagaggccactaggccttgaagtggctgccattttaaagagtcgagtcagatggcctattaactcagattaattgctgtgcttttggattccaggttgatgccggcccaggatggatcagacctgtgaactacccagaagaaattgtctgctgcccttttccaatccagtgaatttagatgcccctgaagacaaggacagccctttcggtaatggtcaatccaatttttctgagccacttaatgggtgtactatgcagttatcgactgtcagtggaacatcccaaaatgcttatggacaagattctccatcttgttacattccactgcggagactacaggatttggcctccatgatcaatgtagagtatttaaatgggtctgctgatggatcagaatcctttcaagaccctgaaaaaagtgattcaagagctcagacgccaattgtttgcacttccttgagtcctggtggtcctacagcacttgctatgaaacaggaaccctcttgtaataactcccctgaactccaggtaaaagtaacaaagactatcaagaatggctttctgcactttgagaattttacttgtgtggacgatgcagatgtagattctgaaatggacccagaacagccagtcacagaggatgagagtatagaggagatctttgaggaaactcagaccaatgccacctgcaattatgagactaaatcagagaatggtgtaaaagtggccatgggaagtgaacaagacagcacaccagagagtagacacggtgcagtcaaatcgccattcttgccattagctcctcagactgaaacacagaaaaataagcaaagaaatgaagtggacggcagcaatgaaaaagcagcccttctcccagcccccttttcactaggagacacaaacattacaatagaagagcaattaaactcaataaatttatcttttcaggatgatccagattccagtaccagtacattaggaaacatgctagaattacctggaacttcatcatcatctacttcacaggaattgccatttgtaagcagtttttggtacaacttaaatatatacatatatgtatatatacaggccacttaaagggaaacttgtaacaaatttgtttttggttgcttatcagttcacagctgaaatcctattgctaatcataagctttgggcaaaattttactttgatttttaaatttatctctgttgtatgaatttggttgttttaagctttttccaaataactcttcattgagagtaggctaatgcttttaaaggcatttgattgagttcaggtttaatttctcaagttggaggtatacatatatgattaaaaaaaaaaaaaaaagatgggttttggcctgccagcaccatgagtgcaggtgaaccaatttagtacttggagtcctgttgctatatgtggcagattatttttttacttgatgacttgactcttacttcaggttgaagggcattttgaacacagattaaagtggctaagatgaagttttcttggacattgtcaaaatctaaattaggctagtttttctgaactacctgttttgaaggtatagcatcctgtgcttttgataactgccaccattagctcttttttttttttttgaggtggagtctcactctgttgccaggctggagtgcagtggttgatcactgcaacctctgcctcttgggttcaagcrattctcctgcctcaccctcccgagtagctgggattactggtacccatcaccacgcccggctaatttttgtatcaccattagctcttgaagtttttctagttttgttttgttttattttattttattttaacagaaccctaactaagacaaagttttatatttatttattgtttagagactggccttgtcatgttgcccaggctggcgtcgggactcctgggctcattcgatcctcctgcatcagctagaactacagtagtttcagattttgaagtgtgtatgtgtatgtgtgatatgtatatattccgtgtgtatagaaatggagagtatcttatttgagttgttgttttcagtaatgctgtcaagtattgttagagggtgataaatgataacatttgtttttatttgagcttatgaagaatttcttgactttctagctaaatgatcagttcacttctcttagcctcaattttattgcgtctaaattccaraagttcttgattgctataagattccttcagctttaaatattaatatttgatattgattttgtttctgcccaaacacattgtttggtcaccgccggtaatgttagcaaagagaattttttttggccaacaaatgtctcataccacattcagtttttataagaaaaacttttatggtatgttgttattctgagttcattaaacattcgctttaccttatatccctgctgttctttaaagttacagagggagaatgtgggtgtgtcacttttgtttctgttgatttgtatcttaattatgccttggtactccttggtttcttggcaattgcagatttaaaaaaatttgctttagtggttatcttgagtctgaattgtcctacacattagggtgggtaggctgttttgaaaacctattggcagctcagacaaatcctttttcttgggttcacgttgaaatttattttatatatatatcgtgtctttgtttttgcacataaatttaaatctgagaatggagatagatgtttctctagaagcatacaaatagaattgtaaacctgtttctcgtcaaagagatgttagtggagtattggttctattaaaaaaaaaatgaaggctgagtgtggtggctcacacctgtagtcccagcactttgggaggctgaggtggacagatcacctgaggtcaggagtttgagaccagtctggccaacatggtgaaactccgtctctacaaaaattagccgggcgtgatggtgggcaactgtaatcccagctactcgagaggctgaggcaggagaatcgcttgaacccaggaggcagaggttgcagtgagccaagattgcgccattgcactccatactgggaaataagagtgaaactctgtctcaaaaaaaaaaacaacaaaaaaacaaacaaacaaacaaacaaaaaactgaaaatattggagcctttagatagtaggttacatgtctaaaatgggagttagcaaatgtataaatgtagaagtttttttttcagggagaaattgaaattgctcaaagactttatcaccttgaagaagcaagtatgtagtttatttatttttttgagacacagtcatgctgtcacccaggctggagtgtagtggcgcgatctcagctcacttcaaccacctcctcctgggttcaagcgattctcccacctcagcctcccgagtagctgggactacaggtgtgcaccaccatgcctgactactttttgtatttttattagagaygaggtttcaccatgtgggccaggctggtcttgaactcctgacctcaggtgatccgcccaccttggcctcccaaagtgctgggattacaggcgtgagccaccgtacccatcccctaatttattattttaggaatttggttcaaagttgtgattgaaatctattgcctttatttttgcctttgatatttttaaactgaagacatttttttttttgagacgaagtttcactcttgttgcccaggctggagtgcaatggcatgatctcggctcactgcaatctccgccttctgggttcaagcagttctcctgcctcagccttctgagtagctgggattacaggtgcgcaccaccaccccagctaatttttgtatttttagtagagatggggttttaccatgttggcccagctggtctcgaactcctgacctcaggtgatccacccgcctcagcctcccaaagtgctgggattacaggtgtgagccacggagcccggcctcagactgaggacttaaaaagtgaggtcagggtgggcatggtggctcacgcctgtaatcccagcactttgggaggctgaggcgggtggatcacctgagatgaggatttcaagaccagcctggccaacatggcaaaaccccgtctctactaaaaatacaaaaaattagctaggcatggtggcaggagcctgtaatctcagctatttgggaggctgaggcaggagaatcacttgaacccgggaggctgaggttgcagtgagctgagatcgccccattgcactctagcctgggcaacaagagcgaaactccctctcaagaaaaaaaaaaaccatcctggccgacatggtgaaaccccgtctctactaaaaatacaaaaattagctgggcgtggtggcaggctcgggaggttgaggcaggagaatcacttgaacccgggaggcggaggttgcagtgagccgagattgtgccactgcactccagccttgagacagagggagactccatctcaaaaaaaaaaaaaaaaagcggtcaatcttagaatgcaaagttaggtaagcaatacagcttgagaaaagtgtaattaaaaataacttttctatgtagtcatgtgatattaatgtattcaacttgttcacagttgatttaagttattgatatagtaggtattgttactatgctgggaattttagaaaatccttagcaaattgctatttgtctctttttgtctgtaattttggctgggcttggtggctaacacctgtaattctagcaagttgggaagccgagacaaaaggattgcttggggcccagagtttgaaactagactgggcaacatagtgagatcctgtctctacactcagttggttgtggtggtatgcctgtagtcccagctactcaggaggctgaggcagtagtaggatcacttgaggccagaagtttgagactgcagtgagccatgatcatgccactgcattccagcctaggcaacagagcaagatcctgtcaaaaaaaaaaaaaaaggagaaaattctcttggcagtgggtaagagtagttattagggttgtagatttcctgtctggaattagagaaagaagggtcatattttctgttattttgtgtatctacctctaagtggactgtttgcctcttgtcacgaattagtagcctcttcagtttaccatcatgtgctcttattttctctgcatacagtgaagtgattgtcattacaatttataatcctgacctggtacttttatatttaattgggctgatattttctaattcttcccagtgtacaaaggttttatgctttgttgttgttgttgagacaggctaggtgctttggatgtggagaattaaatgagcatggcattttcagaggatacttgttggagattgcttgggtaggatggatgtagtcagstaatggggcctagaaattcagactgaagcatttggtattgatgtgatgggaactggcagcccttgagagattttagctgagaagtgatgtaaaatctgtttggaagactttgagtagaggagattagaggcaaggttaggatgtagggtatgttgcaatagtaattaagacttaagaatcggcccagtggcatgtacctgtagtcctagctactctggaggccgaggcaggaggatcacttgaggctgcaattagctgtgattgtgcctgtgaatagccactgcactccaacctaggcaatataatgagattctgtctcttaaaaaaaaaatgagcacagtgagtactctaaagaaagggggtaaatctaaaagattatttcaaagggagaaaattggcagctttttgggggctacctgatctggaggcagattggagtctggatttgaggaatggagagagatgaggcagatgatgtctaaggcttatagttttgctgcctgagacaaaaatgattcctcagaggttccttcctcttctctacccatcatcccacaattttctactccctccttagctatcttggaagaaaattgatctcttcacacctgaggttctgctctctctccgattccctcctggctgggtgaccttttttgtttgtttttgtttttgttttgagacagagtctcactctgtcacccaggctggagtgcagtggggcgatctcggctcactgcaacctctgcctcccaggttcaagcaattctctgcctcagcctctggagtagctgggattacaggcgcccgccaccgcaaccagctaatttttatatttttagtagagacggggtttcaccatcttggccaggctggtcttgaactcctgacctcgtgatccacccgccttggcctcccaaagtgctgggattacaggcgtgagccaccgcgcgcagcctttttttttttttttttttttttttttttaagatgaattcttgctctgttgcccaggctggagtgcagtggtgtgaccttagcccacggcaacctccatctcctgggttcaagagattcttgtgcctcagcctcccaagtagctgggattgcaggcgccctccaccatgcttggctaatttttgtatttttagcagagagaggtttcaccatgttggccaggctggtctcgaacccctgacctcaagtgatccacctgcttcagtctttcaaagtgctggaattacaggtgtgagccaccacgacctgcataccacttctcaaacagtccttttttgcgtccttgttctctttttcttcctctttctctgcagtctcattcactttcattgattctgctgctactccactctatgaaactctcttctgaactgacttcaaaccaacaaattctacttgtcaactaagctgctcctctaccttgtgttatattcacctaaaatgtaatattatttccttttttatttttcctttggacagggtctttctctgtcacccaggctgtagtgcagtggtgccatctcggctcactgcaacctctgccttctgggttcaagtgattctcctgcctcagcctcctaagtagctgggactacaggcgcccaccaccatgcctggctaatttttgtatttttagtagagacagggttttgccatgttggccatgctggtctcaaactcctgacctcaagtgatacgcctgcctctgcttcccaaagtgctgggattacaggcatgagccactgcgcccagcctattattttcattttgaacccatctcttttattgccaaacacgcatttacttcygtgttcatgatgacatcattatcctattcatctcaaagctggaaaccttgcagtcaatcatttaaatgattaaaatacatttgagtacctcttgagccaggcactgccagtataataaaaaataaaaaaattaaaaaaaggaaagagatagtttgcttttaaggaacttcactgtgtggcaaaaactagtgtaaacaatgacaatacagaatactaagtggtctggtaggtgttatgtatgcagtactttgggagtgtggaggaaggcatgcctagaataatcagggaggacttcacagagtggttatttatagtttaagcagagacataccagtaagagggaatagcatatgcaagtggccagaaatccttggctagctatctgggaggagtggggttgtcaggagataaaggtataaagataggcttatatgccgtgctgtatagttgaatgtttttactattacaaaattttacagatgccctcagtttctccctttattcatttttctatgacatctttattgttggtcttcatttagtctttccttccagtctatcctgtgtaaaattacttcctacttccaaaatgagaaatactgggtctctacttaaatttgtaacctaaatgcctcacacctcattttctgaacaaataaagcccaaattcagtgtcctttttgataggatcctgtcctgacctttccaaatctgatgctagagccttgtgtaccctgagttcagccaaactgaactcttaatggtcccttgctccatactctccccttgctcatgcctttattctcctggtctgattcatctttgcatcttaacagtgtatagcatggtgccttctttttactggggacatatcgagttaatgaatgaatgatgctattacagaggtacagtttgggaaggggagtgagtacattttagaaaggtgataagtggattgtcagccttcatcattttcaatggaccaaattactaaaactttacaggttggttggttttttttcttttttcatttcctcatgtactcaatttctaaggctttttgaatttgagcttcctaatatctcatgcattaatttttttctccattctcaactttcactcttttaattaaggataataatttttttttttgagatggagtcttgctctgttgcacaggttcgagggcagtggtgcgatcttggctcactgcaatctccgtctgccgtgttcaagcaattctcctgcctcagcctcctgagtagctgggattacaggtgcatgccaccacgcctggctaatttttgtatttttagaagagatggggtttcaccacgttggttaagctggtcttgaactcctgaccttatggtccgcctgcctcagcctcccaaagtgctgggattacaggcatgagccactgagcctggccaaggataataaattataatggttttaggttggacatctctgactgcatactgcactgtgtttactggaagaagtcccttaatgtctctaaggcccatttcctcagttctaaattacggctagtaccttcattggagggttgttaagtctatgatacaagataactttttttttttttttttttttgagacagagtctctatcgcccaggctggagtgcaaaatggcacgatcttggctcactgcaacctccacctcatgggttcaagttgattctcctgcctcagcctcccaagtagcttggattataggcatgcgccaccatgcccgactaattttgtgtttttagtagagatggggttcaccacgttggccaggctggtcgaactcctgacctcaggtgatcgacccacctcggcctcccaaagttgctaggattacaggtgtgagccatctctcctggccatgatacaagataatttatatgaagtaatacactgctggttctgaagtaggtgtgcagtaagtgatgcctactgctgcatgccaagagtcaaatgtatatttgaaagagttgtgaatttcaagaaagatatttttgagtttttttttttttctttctgagacagggtcttgtactgtttcccaggctagagtgcagtggcctgatcttggctcctggctgggcccaagtgatccaccgccctcagccttccaacgtattgggattacgggaatgagccactgcatttggctaagtttttgttttttttttctctatttttccaaacttatttgattagtaagataaagacattaactgctgttgacagtttccatttttaattagtaatcaggagcatttgttgtatttttgtttgataatcagaataatttaatttgtgcaataggatcaatagctttctgtattccaactgttaagtggtgtaagtttattacattgttgctttttgcaggttgtcctttgttctagatagaaatgtttaatttattcttcctggttttcaggggagcccattgaaaggagatccagtctctgaaatttagtggtaggataataacaattgaacagttacttttgaatctaatttaaataatctcaattgtagccttttaaagcaattcctatgaacctttttgaatttagaaaagtaatacttggccgggcgcggtggttcacatctataatcccagcactttgggaggctgagggggtggattatctgaggtcaggagttcaagaccagcctggccaacgtagtgaaaccctgtctctactgaaaatacaaaaaaaaattagctgggtgtggtggcacgtgcctgtagtcccagctactcaggaggctgakgcaggaggatcgcttgaacccaggaggcagaggttgcagtaagctgggattgtgccactgcactccagcctgggtgacagagtgagactttgtctcaaaaaaaaaaaaaaaaaagtcaaacttaaaaatggaatataaaaatctcttgatttttgtcagttttcatatactccctcatttacactcttaatattctattagaaattgtctcttctctctacacacccctttttttcccttttggttaatatgttaagacatcttttcatatgagcatgtaacatgtaacaagattttttttttttttttggacagtgtctcgctctgttgctcaggctggagtctagtagtatgatcacaactcactgcagtttagacctcctgtgttaaagtgattctcctactttagcctcatgagtagttgggactacaggcccatgccaccacgcctggctaattaaagaaaaaattatttggtagagacagggtcttgctatgttgcccaggctggtcttgaatttctggcttcaggcaattctcctactctgcatgagccacctcagccgcgaatattttcttattatgaaatttttgtttagataaatgttgattcacatgcagttgtaacaaattccatggccaggctgggcgtggtggctcacgcctgtaatcccagcactttgggaggctgaggtggatcacctgaggttgggagtccaagaccagcctgaccaacatggagaaaccccgtctctactaaaaatacaaaattagccaggcrtgatggtgcgtgcttgtaatcccagctacttgggaggctgaggcagaagaatcacttgaacccgggaggcggaggttgtagtgagccaagatcgtgccattgcactccagcctgggctagaagagcgaaactccatctcaaaaaaaaaaaaaaaaaatcaggaaattccatgggctaggcacagtgacttatgcctgtaatcccagcgttttggaaggctgaggttggaggattgcttgagcccaggagtttgaggctacagtgaacactgactgtgccactgcactccagcctgggtgaccctgtctcttaaaaaaaaaaaagaatacagagaggtcccttgtatattttgcctggttttgcaatggtaatattttgcaaaaaatatctaataccacacaaccagaatattgatgttgatgtacttcaccaatcgttttttttttttttttttgagtcggagtctccatctgatgcccaggctagagtgcagtggctcaatctcggctcactgcaacctccacctcctgggttcaagcaattctcctgcctcagcctcctgagtagctgggactacaggcgtgtgctatgacgcccagctagtttttgtatttttagtagagacggtgtttcaccgtgttatccagggtggtctcaatctcccgaccttgtgatccgcccgcctcagcctcccaaagtgttgggattacaggcttgagccaccgcgtccagccagtcttacttaggcattgacgttcatgtaatttatccatcttattcagatgtccttaaattttatctttttccttaaaagaaatctgtatttctatcaggacattctggatgtccccagttttactggtagtctttcattgtgtgtatattaagttctttgtttttatcacctgtataggttagtatatccatgactcccgtcaactttctaaatgttcgctgggtgcagtggctcatgcctgtaatcccagcactttgggaggctgaggcggctggatcacctgaggtcagtagttcgagaccagtctggccaacatggtgaaaccccgtgtctactaaaaataaaaaaaaaattagctggatatggtgggtcatgcctgtaatcctagctactcgggaggctgaggttggagaatcgcttgaacccaggaggcggaagttgcagtgagctgagatcgcgccgctgcactctagcctgggtgacagagtatgtctctgtctcaaaaaaaaaaaaaaagttgctaaacatttctaataccataaggatccctgctgttgccagccgttttaaaactacatccatcgtcttcttggcaaccttccatctctttttcgtatgtgacagcgtcttgctctgccgcccaggctggagtgcagtagttgcatctcagctcactgcaccctctgtgtcccaggcttaagcgatcctcccacctcagcctcctgattagctgcgactacaggcacttgccaccatgccccactaatttttgtatgtttttgtagagatggggttttaccatgttgctcaagctcgtcttgaactcgtgagctcaagcaatccgcctgccttggcctcccaaatggctgggattacaggcaggagccaccatgcctggcctagcccctccatctctagcctttgtcagttactaaactttttttcctgaagttttgtcatttcacaaatgttagataaacatgagtcatacagtatgcagccttttgggattgtctttttttcccttagcataatttccaggggattcatctaagttgttgactaaatcaatagttgttttttttgtttgttttttttttgagacggagtttcactcttgtggaccaggctggagtgcaatggcatgatcttggctcactgcaacctcygcctcccaggttcaagcgattctcctgcctcagcctcctgagcagttgggattataggcccctgccaccacacccagctaatttttgtatttttagtagagatggggtttcaccatgttggtcagggtagtcttgaactcctggcctcaagtgatctacctgcattggcctcccaaagtgctgggattacaggtgtgagccactgcgcacggccctagttttttcctttttatcactaagtaatattccatgatacaaatataccatggtttgcttgaccgttcacctgttgaaggacatctggggcaatgctagcttttggtaattaaggtaaaagtactatttatgttcatttatggggttttgtgtgactgtaagttttcacttctctgggataaataccagtagaacaattgcagtattatatggtaatggcatgttaagttttttttttttcctgagagggagtttcgatcttgttgcccaggctggagtgcaattgcgcgatcttggctcgctgcaacctctgcctcctgggttcaagcgattgtcctttctcagcctcgcatgtagctgggattataggtgtcaaccaccacacccagctcatttttgtatttttagtagagatggggtttcactgtgtttgccaggctggtcccaaactcttgaccccaggtgatccaccctcctcagcctcccaaagtgctgggattacaggcgtgagccacggcgccccgccaatgttcagttgtttttttgtttttttgagacaatctctctctgtcacccaggctggagggcagtggcgcgatcctggctcactgcaacctctgcctcccggattcaagcgattatcccgcctcaggctcctgagtagctgggaccacaggtgcacaccaccacaccaggctaatttttttatttttagtagagacggggtttcaccatgttgggtcaggctggtctcgaactcctgacctcaggtgatccacccacctcggcctcccgaagtgctgggattacaggtgtgagccaccacrcctggcccaatgttcagttttataagaaactaccaagctgttttccctagtgtctgtaccatttacattctcactagcagtatatgagtgatccagtttcttttattttttgttttttgagacggagtctcgccctgttgcccaggctgaagtgcagtggcacgatctcggctcactgcaacctctgcttcccggcttcaagtgattctcctgcatcagcctcccaagtagctgggattacaggcatgtgcaccatgcctggctaattttttgtatttttagtagagatagggtttcaccatgttggccaggctggtctcgaactcctgacctcaggtaatccacccatcttggcttcccaaagtcctgggatttcaggcatgagccattgcacctggccgagtgcttcagtttctatgcatcctcaccagcatttggtgtggtcactattttaattttagccattcgtgtagatatgtagtaatgtctcatctcattatgttttgtttttttttttgagacggaatgttgctcttgttgcccagactggagtgcagtgatgccatctcggttsactgcaacctccacctgctgagttcaagcaattctcgtgcgtcagcctctggagtagctgggattataggtgtgcatcaccaygcctggctaatttttgtattttttagtagacatggggtttcaccacgttggccaggctgttcttgaactcctgacctcaggtgagctgcccacctcggcctcccaaagtgctgggattacagttttgtatggtggattccatgcagagagagttttttctgtagtctagattagcagtccccagcctttttggcaccagggaccaaattcctgggaaacagtttttccacaggtgggagtgggatggtttggggatgaaacttttccaccttagattatcacgcattagttagaatctcataagaagcgcgcaacctagatcccttgcatttgcagttcacaatagggttcatgatcctctgagaatctaatgccacccctgatgtgacaggagtgggagctcaggcgataatgctcccttgtctgctgttcacctcctgctatgcagcccggttcctaacaggctgagaggaccagtaccattctgtggcctgggcgttggggacccctgttctagatgatccacattcttttaaatgcctatatacaaaccatactttctttatttcttttctttttttgagacagtcttactctgtcacccaggctagagtgcaattgcgtgatcttggcacactgcaacctctgcctcccaagttcaagtgattctcctgcctcagcctcccgagtagttaggactacaggtgtgtcccaccatgcctggctaattttttatatttgtattttttaatttttatttatttatttatttttttgagatggagtctcgctctgtcacgcaagctggaatgcaatggcacgatctcggctcactgcaacctccgcctcccgagctcaagcgattctcctgcctcagcctcctgtgtagctgggattacaggcacccgccacgacgcctggcttttttgtatttttgtagagacaggttttcactgtgttgtccgttctggtctcaaactcctgagttcagggaatccaccgccttggcctcccaaagtgctgggattacagtcgtgagccaccgcgccctgccacaaaccatactttgaaaacgttgcttccatttttagataatttgttaggaaaccaataaaatcatacatacttgtgattttcccttagtaaaacacaaattttagtgttttttgctgttattattaatacttctaaagttcctttcacattgctagtgaccttatataaaataccataatgctcttctagcaattgctggaaagataaaatctattttagagaatgaacaattatattttcacattagattaaattaaaagtaattactggttatgtgatattccctcacataccagagtgagtctgaaggtagtctttctttgtaaattatgaggctatatttcctgtgttatctctgatttctcttgatgctgtaattggagttgttgggtctccctggtgaaagtaggtgatgtgcaagttgtgtctatacccagtgaaaataacagacattaatgctacactaatttgtcattggaattttacattcaaaagcatttctttttaaaaatatgattgtaaattggtaatttatagttgtatataccaaaggcatttctttaacgttatagttggttcaactgaaaatacgttaagtctgtttttataattagtatattgaggaacagcacttccatcrtgtcacaatatattaagaattgccagcagggcacggtggctcacgcctataatcccagcactttgggaggcctaggcgggaggatcacctgaagccaggagtcgagaccagcctggctaacgtggccaaacccctatctactaaaaatacaaaaattagccaggtgtgatggcgggtgcctgtagtcccagctactcgggaggctgaggcaggagaatccagaattgaattgaacccaggagacggaggttgcagtgagccaagattgtgccattgcactccagcctggacaacacagcgagactcagtcttttttatttttatttttatttttgagacggagtttcgctcttgttgcccaggctggagtgcaatggcacagtctcggctccctgcaacttctgcctcccgggttcaagcgattcacctacctcagcctcccgactagctgggattacaggcatgtgccaccacgcccggctaatttttgtatttttagtagagatgggatttctccatgttggtcagacttgtctcggactcccaacctctggtgatctgcccgcctcggcttcccaaagtgctgggattacaggcatgagccaccgtgcgtgtccttttttttttttttatcttttgagacagggtctcactctgttggctaggctggagtgcagtgatgcagtcacaactcactgcagcctcaacctcccagtctcaagcaatacccccacctctgcccctttgagtaggctgggactacaggtgtgtgccttcatacctagctaattttttttgttttgttttttgagacagtcttgccccatcgcccaggctggagtgcagtggtgccatctcggctcactgaaagctccgcctcccgggttcacgccattctcctgcctcagcctcccgagtaactgggaccacaggtgcccgccaccacacccggctaattttttgtatttttagtagagacggggtttcaccatgttagccaggatagtctcgttctcctgacctcatgatccgcctgccttggcctcccaaagtgctgggattacaggtgtgagccactgcacctggccatgcccagctaatttttgtatttttttgtagggatgggatggcactatgttccctaggctagtctttaattcttgggttcaagtggtcctcctgcctcggcctcccaaagtgttgggattacaggtgtgagccactgtgccgagccaggttgtgtgtgtgtgtatgtatgtatgtatgtatgtatgtatgtatgtatgtatgtttgtatatatttatatttatttttttggaactgcatctcactttcatccaggcccgaatgcagtgacatgatctcagctcactgcaacttctgcctcctgggttcaagcgattctttttttttttttttttttttgagacggagtctccctctgtcgccaggttcactgcaagctcyggctcccgggttcacgccattctcctgcctcagcctcccaagtagctgggactacagatgcccaccagcatgcctggctaattttttgtatttttagtagagatggggtttcactggggtttcaccatgttagccaggatggtcttgatctcctgaccttgtgatccgcccgcctctgcttcccaaagtgctgggattacaggcgtgagccactgcgcctggccatttcttttttttttttggcaagtgattcttgtgcctcagcctcccgagtagctgaaattataggcgtgtgccctcaacgcctgggtaatttttgtatttttagtagagacagggtttcaccatgttggacaggctggtctcaaactcctggcctcaagtgatccaccctcctcagcctcccaaagtgctgggataacagctgtgagccaccgtgcccttcccaggttttatatttattcttttttccttttaaattatgtttttatttaggtattgtacgtaaagtgcttttctaacagagctttggggcagaagtgttagggcaggtcattaaaccactgaaattagttctttggaggagaagataattgttagagttgtaagtgaagtcttgatagataccttatcaatttcatagtaatgtctgtggaatttctttttctgttttttttttttttaattatttcttgaggattaactgctgatagtggaatatcatatatatagttggctcttgatgtacttatttctggatggctttccaaaaggattttaccattttacacacagttctaaatagtatatgaatttagcatttgtcccacacttagatagcactgatttttttttttattaagtgggtgcaaaatgctactacaagattgctttaattactacagttttattgatgaaaatgatttctacttgtttactgtttgtatttttttctaggagttttgtgtctatattctttgctgatgtatctttttggatttaatgttttatacatattaaatttctgtctcattggatataaatattttcccaatctggttttcattttagttaatgattttctgtagttgtatagtcaaagtttcatttattatatagctagatctgtgttttcgagtgatttattgattcaaagcttattgtgcttctagatatttgataaactgactttagactcttgtaaaaatttgaagaactcatatctactacagtcttactgatttaataggggttttaatatccagtactatgctaataatttttatagtgtttttacgacaattttttgagaacataagtttttagagctgtggatggaatgttttctgctctatcagttatcccttctgcgtaacagacccctaagtgtagcagcttagaggagtaaatatttattatctcacattttgtaaggaatcatggagtggcttagctggatggtgctggctcagtctctctaatgaatttacagtcaagatgtctgccagggctgcggtctctgaaggctgtaggatccctgtccaagacggctcactcatatggatgctagctctttgtatgaggcctgttctttcccacttgcacttctccataggcctgcttactgtatggtagctggcttttcccggagtgagtgatccaagagacagggacagaccaagcaggaagatgcagtaactttttatgatgtgtattctattggctggccacacataccaagcagatagggaagggattacacaaaggcatgaataccatcaggctgggataattgggggccagcttggaatctggctaccatatccaaccaaataagaaattaatagttttaattaaaggaaaaggattatattaaatagacattcgttagtttttacttttaagctgacccaatcatttttcagattgaagttttgaatagatatatgattaaaaaatacatgaaaagttaaccagtgaagtgacctctgtgccatgtttgctcaggtaacgcacctccaattcttgtgctttcccggagaccaccttttttaagagaaaggtagtggactgtgcacacttggtcttcctttttcacataatggtgtatgttgaaatctttccattttagagcatagctttccctttttaattttattattattattatttttgagacagagtctccctctgtcgccccagctggaatgcaatggtgcgatctcggctcactgcaacctccagctcctgggttcaagtgattctcctgcctcagccacctgagtagctgggattacagtcgcctgccaccatgctcggctaatttttgtatttttagtagcgacggggtttcaccatgttggccaggctggtctcgaactcctgacctcaggttatccacctacctcagcctcccaaagtgctgggattacaggcgtgaggcaccgtgcccggcaattttttttttttgagtcagagtcttgttctgttgcccaagttggagtgcagtggtttgatctcggctcactgcaacctgtacctcctgggttcaagtgattctcctgcctcagcctcccgagtagctgggactacaggcatgccccaccatgcttggctaattttgtattttagtagagactaggtttctccatgttggtcaggctcgtgtcaaactccctacctcaggggatccgcccaccttggcctcccaaagtgctgggattatagacgttagccaccgcgcctggcctaatttttgtattttcagtagaaatttttgtatttcactgtattggtcaggctggtctggaactcctgagctcaggtgatccacccgcctcggcctcccaaagtgctgggataacaggagtgagccactaggtgtgacctaatttttgtatttttagtagagatgggatttcaccatgtcggctaagctggtctcgaactcctgacctcaggtgatctgcctgccttggcctcccaatgtgctgggattataggcataagccaccgcactggctttttttttttttttttttttaaacctggatggttttattttgcatgaatgtatagatatttcctgttcatacattctgaaagtgaacaactgtatatatgcaatttatttttattcttatttatttatttgtttattttttgagaccagagtctcactctgtcgcccaggctagagtgcaatgacacaatctcggttcactgcaacctctgcctcctgggttaagcaattcttctgcctcagcttccccagtagctgggattacaggtgtccgctaatttttgtatttttacaaaatacacccaggtaattttttgtaattttggtagagacaggtttcaccatgtcggccaggctggtctcgaactcctgacctcaggtgatatgcccgactcagcctcccaaagtgctgggattacaggtgtgagccactgcgtctggcctgcatggggattcttaatgaagattaattattgtagttgagggggaaaaggaataataaatatttattggaccctaaataccttcgaatatggaataccctaggtattctagggcatttagggaccaataaatatttattcctccgtactcttccctcgctcttttcagatttttttttttttttttttttttttgagatggagtcttgctctgtctccaggctggagtgcagtggcgcgatcttggctcactgcaacctctgcctcctgggttgaagtgattctcttgcctcagcctcctgagtggctgggactacaggtgcataccactatgcccagctaatttttgtattttttgtagagacaggctttcaccatgttggccaggatggtctcgttctttagacctcgtgatctgtcttcctcagcctcccaaagtgttggaattacaggcgtaagcctccgccgggccttttttagatttttaagagaatttttgttaaagcatgaacttaaaaaatcagacttggcttggagcggtggctcatggcctctagtcccaggactttgggtggctgaggcaagtggattgcttgagcccaggagttcaagacctgccttggcaataatatcaagaccccctcttcatgaaaaacaatcaagctaatacttgatactattttacataagaattttttatagtatgtcatgttttaatgtatattggttatatagttgcaaatttaaaggcatggtggtggctcatacctgtaatcccagcactttgggaggctggggcgggcagatcttctgaggtcaggagttcaagaccagcctggccaacatggtggaaccccgtcttaggctgaggcaggagaatagcttgtgcccaggaggcagaggttgctttgagctgagatcgcaccacggcattccagcctggaggacagagcgagactcygtctctaaataaataaataaataaataaatgtatactaactgcattagcaagactccgtctctaaataaataagtgaataaataaatgtatactaattgcattttaaaaatcaaagtataggccgggtacggtggctcacaactgtaatcctagcacttttggaggctgaggtggatggatcacctgaggtcaggagtttgagaccagcctgaccaacatggtgaaactttgtctctactaaaaatacaaaattagctggtgtggtggcgcatggctgtaatcccagctactcgggaggctgaggtaggagaattgcttgaacctgagaggtggaggttgtggtgagcggagatcgtgctgttgcactccagcctgggcaacaagagcgaaacttcgtctccaagaaaaaaaaaatatataattcacataagataaaattcaccctctttggccaggcgcagtggctcatgcctgtaatcccagcactttgggaggtagaggtgggcagatcacttgaggtcagggagtttgagaccagcctggccaacatggtgaaaccccatctctactaaaaatacaaaaattagcccggtgtggtggcatacacctgtaatccacctactcaggacgctgagtctgcactcagtccctgggctacagggtgaaactgtatctcaaaaataaagaataaaatgcagctacttaaagggtgtagagttgaacaactgttaccactgtctaattccagaacctttcatcaccccaaaagaaaacccattcccagcagtcatttcccattaagtctcctctagcccctcacaaccactaatctaattcatgtttctatgtatttgcctattctaggcgtttcatacaaatacagtcatataatttgtggcctttcgtgtctgacttgtttaacttagcataatgttttaaggcccatttatgttgttgtatgtatgcatacttcattccattttactgctgaatattgctttgtactgatgccactttttgtttgtcttttcatcacttgacggacattttgtttcttccactttgtggctgttacaggcagtgctactgtgaaaatttgtattaaagttttagcgtgaatatatgttttcagttctcttgggaaaatacctagaagtggtattgtcggatcatagggtcattctatgtttagcattttgaggaacagccagactgttttacatagtggttgcaccgttttacagtcctactttagcctatatgggttctaatttctttctttctttctttctttctttctttctttctttctttctttctttctttctttcttttctttcttttctttcttttctttcttttctttctttctttctttctttttttagaacagagtctccctctgtagcccaggctggagtgcagtggcatggtcttggctcactgcagcctccgcctctcgggttcaagcaattctctgcctcagcctcccaagtagcttggactacaggcgcccgccaccacgcctggctaatgtttgtatttttggtagygacagggtttcaccacattggccaggttggtcttgaactcctgacctcaggtgattcacccacctcggcctcccaaagtgccgagattacaggcatgagccactgcatccgggcgtgggttctaaattcttaatattctcatcaacatttattgctgtctttttaattttagcctgtaatcccagctactagggcgactgaggtggtagcatcgcttgagcccaggaagctgaggctgcagtgagccaagattgcaccactgcactccaggctaggtgatgaagtgagacttcatctcaaaaaaaaaaaaaaggaagtaatggcaaaaactggaattattttgcaccaacttaaatatttagatctttaatacctttggaaagttttttatatatagtttgtgtgtgtgtgtgtgtatatatacacacatatatatatacacacacatatatacacacatatatatgaatgattttatatatatatatatatatatatatatgaatgatatatatatatatatatgaatgaatgaatgagatggagtctcactctgtcacccaggcaggagtgcagtggtgccattttggcttatggcagcctccgcctccggggttcaagtgattcttgtacctcagcctcccgagttgctgggattacaggcactcgccaccatgcccggattttttgtcttaattcatgaaggatgaattaagtctgcagttgttctttttccctttttctttccagtttttttttttgtttgtttgtttgtttttgagacacagtctcactcggttgtccaggctggagtgcggtggcagtatcttggctccctgtaacccatctccctggttcaagcgattccggtgcctcagcttcccaagtagctaggattacaggtgtgtgacaccacacctggttaatttttgtatttttagtagagacgaggtttcaccgcattggttaggttggtctcaaaactcctgacctcaggtgaaccgcccacctaagccttccaaagtgctgagattacatgcatgagccaccaagtctggcctaagtctgaatttttttttttttttttttgagacggagtttcgctcttgttgcccaggctggagtgcaatggtgcgatcttggctaaccgcaacctccgcctcccacgttcaagcaattctgcctcagcctcccgagtagctgggattgcaggcatataccaccacgcctggctaattttgtatttttgttagagatggggtttctccgtgttgagactggtctcgaactcctgacctcaggtgatccgcctgcctcggcctcccaaagtgctgggattacaggtgtgaaccactgcacccggccgaatatatwtwtttttttttaaatggagtctcgctctgtggcccaggctggaatgcagcggtgtgatcttagctcactgcaacctctgcctccctggctcaagcgattctcctgcttcagcctcctgagtacctgggaccacaggtgtgcaccaccatgcctgaataatttttttgtgtttttgtagagatggagtttcaccatgttggccaggctgatctygaactactgacctcaggtgatgtgcctgcctccgccttcccaagtgctgggattacaggcatgagctactgtacccggctaagtgtacagtgttcttgtgatgtctttgtctggtgttggtatcagggtaatactgtcttcaagattacccttgaatgagctttacttcattttttaatgtgtttttttttcttttcttttgttttttgtttttgagacagagtttcactctgtcgcacaggctggaatccacactctaggctcgctgcagcctccacctcccaggttcaagagattctcctgtgtcagcctcttgagtagctggggttacaggcacgtgccacgacgcccggctgatttttttgtatttttagtagtgacgggctttcaccatgttggccaggctggtctcgaactcctgacatcaagtgacctgccttcctcagcctcccaaagtgttgggattacaggagtgagccactgtgccccgcctgcaattacttcttaagttctcaattaaaagagagtttatcaaggactttttttggtaattttgcattttgaaaattgctaacattaactgggacagcccttttatttatttatttgtcactcagttgtttttttgagttgcctactatgtcccaggcactggtaagataggagtatcattgtacctgaggcagggcaacatgtgcttgcttgagaggagcatgatctaggattataaggactgcaacctccccttcccaggttgaagcagttctcatgcctcagcctcccaagtagctgggactacagccatgagccaccacgcccagctaatttttgtgtttttagtagagatgaggtttccccatgttggccaggctagtctcaacttctggacctcaggtgatctgcccacttcagcctcccaaagtgctgaaattacaggagtaattttattctcccaaagctgctgctttgggagaataaaaagttgagtatgggccaggcatgggggctgatgcctgtgatcgcagcactttaggagactgaggtgggagtctagcttgagcccagtagtttgagacaagcctggggaacatagggagatccggcctctacaaaaaaaataaattagctgggtggagtggcatgtgcctgtggtcccagctacttgggtggttgaggtgggaagatatctgagctcaggagttccaggctgcagtgagctctgattatgcactccagcctgggtgacagagtgagatgctgtctcaaaaaaaaaaattcagtgtggcgtgattaggctgggagggtggggcaggaagggatgacattggaggggtaggcaaggtgtagatagacctttccctatattctcctatttttaaaaaatttttttctaaatagagatagggtcttactattttgcccaggctgggtctcaaactcctgggctcaagtaatccttccatctaggcctctattttttgtgcaaacgattgaaattatattttttttacctgaatttttcctgtgaacattgggttatttataaacctgttttctgtttctttctttctttttttttttttttgtttttgttttttgagatagagtccagcctggagtgctgtggcatgatcttggcacacttgcaacctctgcctcctgggttcaggtgattctcctcctctagcctcctccacgcctggctaatatttgtatttttagtagagatggggtttcaccatgttggccgggctgttcttgaactcctggtttcaacagatccacctgcctcagcctgccaaagtgctgagattacaggtgtgagccactgttctaggcacttgtttctgtttcttaattttggctgctactcagtgggaaaaagcacagattgaatctaattgaggccgggcgctgtggctcactcctgtaatttcagcactttgggaggctgaggtgggcagatcacctgagatccagagttcgagactagcctggccaacatggggaaacctcatctctactaaaaacacaaaaattagttgggcgtggtggctcatggctgtagtcccagctactcgggaggctgaggcatgagaattgcttcaacccgggaggtggaggttgcagtgagctgagatcaggacactgccctccaggttgggcaagagagtgagactcggtcttaaaaaaaaaaaaaaatctagttgaaaaatgtcatcgggtctttccaaatttttactaggaatttgttaaaattaaccaggctggaagtcattatagtttgtttgtttgtttgtttgagatgggggtctcactctgtcacgcaggctggagttcagtggtaggatctcggctcactgcaacctctgcatcccagattcaagcgatcctctcacctctgcctcatgagtagttggaaccacaggcatgtgtcaccatgcttttgtagagacagggtttctttcgccctrttggctaggctggtctcaaacttgtgagctcaagcgatccgcccaccttggcctcccaaagtgctgggattacaggcatgagttaccttgccttgcccattatagcttttttgaggctgggtcttactctctgtcatgcaggctggactgcagtggtgtgatctaagctcactgcctcctgggctcaagcagtcctcccacctcagcctcctgagtagctggcacaggcgctacctcacccatctaattttttattttttttagagatggggttttgccatgtttgcccaggctggtctagaattcatgagctcaagtgatctacctgcctcggcctcccaatgtgctgggattacagacatgagccactatgttcagccatacctggctaatttttaaaaaatgttttcaagagacagggtctccctgtgttgcccaggttggtctcaagttcctgggattactgctggccttcaaaagtaaatgtgaaataattagttaatttctccctcagttgacaaataatgccaaaagtgataaagattaatgaaatgtctcttttttttttttttttttgagacggagtctcgttctgttgccaagtctggaatgcagtggcacgatctcggctcactgcaacgtccacctactgggttcaagtgattctcctgcctcagcctcccgagtagctgggactacaggcacgcatcaccatgcccggctaatttttgtatttttagtagagacggggtttcactatgttggccaggctggtcttgaactcctgacctcatgatccacccaccttggcctcccaaagtgctgggattacaggcatgagccaccgcgcccagccatgaaatttcttacgtagaaaggcagcttgggattgtagaaagaatgtaggctttggagttggacaggcctccatttgagaccatacttgagtcccgtgcttgccttagacaaagaacctctcaaccttagtttttaatctataaggtgttttgaaaattaattcctagttcagtacatggcacatggtaggtacctgctgctatccataattctcttagttaatatattcggtgccacatgccaggcagccaggatctgtactaagcacctaataagtattatctcatttaatcctcaaaagaaccccacctgagttgctagacagccattatttcagggttacacattaggaaattgaagcttagagagatttaagtggttagccaagtgatggtgctggtattccaactaaggtcatctgctttcagagcatttactttctgttaggctgcctctcctgttgcaaagtactaagaacacaactacataatgtatttttagtggattcttgtctttttgtaaatagaaggttaaaatgagaggaattttttttttgtttgggagacgtggtctcgctctgatgagagctagaaatttgattacttgtatttctggtctgcataaaaatttggcctaaaaacatcaatagaaaggcaagtgtcatctgcaaatctgtcccatcctgttcttcacaggaaaatgtaacctttttttttttttttttctttttttgagatggagtctagctctgttgcccaagctggagtgcaatggcatggtttcccgctcactgcaacctctgccttctgggttctagcagttctcctgcctcagcctcctgagtagctgggattacaggcgcctgccaccatgcctggctaatttttgtatttttagtagagacagggtttcaccatgttggccaggctggtctttaactcctgacctcaggtgatccgcctgcctcggcctcccaaagtgctgggatcacaggtgtgagccactgcgcccgggctcaaaatgtaacgtctgtctagtatgaggatttatttccttgtctgacttctgagttgtaatcgtttattaacaatcacattgtaagtttatctatgaagtaataaaatgttctttctgtatattatactggaaatgaatgcttcattcaaaaaatagttttatcttgggaaggtagccactttttaaaaattgaggtaaaacggccaggcacggtggctcacgcccataattccagcactttgggaggccaaggtgggtggagatcacctgaggtcagaagttcaagaccagcctggccaatatggtgaaactccatctctactaaaatacaaaaattagaccggcatggtggcaggtgcctgtaatcccagctactcaggaagctgaggcaggagaatcgcttgaacccaggaggtggaggttacagtgagccgagatcctgccgctgcattgaagcctgggtgagaagagcgaaactctgtctcattaaaaaaaaaaaaaaagaggtaaaatttaaataacttaaggctgattgtattggcttacacttgtaattccagcattttgggagaccaaggcaggaggatcacttgaactcagaagtttgagaccagcctggtcaacatagggaaacctcatctccacaaaaaataaaaaataaaatataaaaacttcaaaattaaataagttacagttcaccattgtaaccattttattttatcctatttattttgagacagtcttgttttgtcacccaggctggagtacagtggtgggatcacagctcactacagcctccaccttccaggttcaagtgattcttctgcctcagcctctgtaactgggattacaggtgcttgccaccacaccctgctaatttttgtattttgattagagacagggtttcaccatgttggcccgattggtctcgaactcctgagctcaagtgatctgcctgtcttggcctcccaaaatgagccaccgtgcctgtccccttagtctactttaaaattcaatttgccttttttttaaattgtaagaattccttatatattttggatattaaatccttaactagggatatgattcgcaaatttttttcccccattctgtttctgtaggctctttgacattctttttctttctctttttgagacaaggtcttactctgttgcccaggctagagtacagtggtgtgatcatagcttactacagcctcgacttccctgggctgaagcaatccttacctcccacctcagcctcccaggtaaccaggactacaggtgtacaccaccatgcctggcaaatcactgttgttgttgttgttgttgttatagccataggctcccactgtgttgcccaggctgggctcaagcaatcttctagccttctagccttggcctcccgaagtggtgggattatgcgcatgatcgctgctcccagcccacaatctttttttttttttttttgagatggagtctcgctctgtcacccaggctggagtgcggtggcgcaatctcggctcattgcaacctccgcctcccgggttcaagcgattctcctgcctcagcctcccgagtggctgggattacaggcacgtgctgccacgcccagctaatttttgtattttttttttagaagagatggggtttcaccatattggccaggatggtctcgaactcctgacctcatgatatgcccaccttggcctcccaaagtgccgggattacaggcatgagccaccgcgcctggcctcccagcccacattcttgataattttctttgcttctaaaagttttgcttttagggttgggcaaggtggcttatgcctataatcctagcactttgggaggctgaggtgggcggatctcttgagctcaggagttcaagaacaccctgagcaacatggaaaaaccgtgtctctacaaaaaatgcaaaaattagccaagtgtggtggcatgcacctgtagtctgagctactggggaggctgtgacaggaggatcacttgaattggactggaggctgcagtgagtgaaaatggtaccactgcactccagcctgggtaatagagtgagatgctrtctgaaaaaaaaaaaaagttttagtttttttgggtggggggattttaacttcacctattttttttgttgttgctcagttttgttgttcaatctatgaatcctttgccagatctgaaattatgaacccttatccctaaattttcttataaaagttttgtagttttagctcttatatttaggcccttgataacattttgagttactttttttttttttttttccctgagatggagtctcgttctgtcgcccaggctgtagtggcgcgatctcggctcactgacatggctgcttcctgggttcaagcaattctcttgcctcagcctcctgagtagctggggttacagtcacgtgccaccatgcccagctaattgttttgtgtaattttagtagagatggggtttcagcattttggccagggtggtcttgaacacctgacctcaagtgatctgcccacctcggcctcccaaagtgctgggattacaggtgtgagctactgggcaaggctgtgccagaccttgagttactttttatatattgaatgaggcataagccaaagtttattaggtgatccagttttctcagtaccatgtgttgaagagactattattctttttccattgaattcaaaagagactaattttttaacattcctttgaaatgctattctttttccattgactattgttttctccgtgtcaaaaatttattgaatatggccgggtgtggtggctcacacctgtaatcccagcactttgggaggccgaggtgggtggatcacctgaggtcaggagtttgagaccagtctgtccaacatggtgaaacccatttctactaaaaatacaaaattagccaggcttggtggcgcatgcctgtaatcccagctacttgggaggctgaggcaggagaatcgcttgaacctgggaggcaraggttgcggtgagccgagatcgcgccattgcactccagcctgggcaacaagagcaaaactctatctcaaaaaaaaaaaaatatatttgtgaggctttatttctgaagttttaattttattccattggtctatatttctactcgtaggctactagtacacactgtttttgattactgtagctgaattctgcttctgcgagttcttcagtcttattttattttccagtacagatggtctcagatatacgatggttttacttagagtttttgaacttcatggtgggcttatctggacgtaagcacatagtaagtcgagcatctgcagttaacaatggttcaacttaacgatattttcgacttatgatgggttaatcaggatgtaaccccattgtgagttgaggagcatctgtattgttttggctgtttaggcttcctacagttgcatatgatttttactttttggcggaggtgtccggtattgaatgaacctagggcctcatgcatagagttccatatgaatttgaggttagctttttcatttctctaaataggccattggaattttcatcgggattccactgaatctgtaaatgattttagggagtattgccrttttaacaacacagtattaaaaattccaagtaatgaacttgggatgtcttcccatttctttaggtctttaatttcctttcaataatgttttgtaattttcactgtataagacttttcacagcctaggttaaatttattcataggtacaaacagttgttaattcccacagttttacttaatgattttttaactttatgatagggtttactggaggattgaatgcattttcaacttatgatatttttgacttatgatgggtttgttgggacttagccctgttgtaatttgagaagcatctatctgtgtgtctttcttttggatcctgttaagtgggattttttgctcagtttcctttttggattgttcattgctttttttttttttttttcttttttccggagacagagtctcactttgtcgcccaggctggagtgcaatggcgtgatcttggctcactgcagcctctgcctcccgggttcaagtgatttctcctgccccaccctcccaagtagctgggattacaggtgcccaccaccacgcccagctcatttttgtatttttagtagagatggagcttcaccatgttggtcaggctggtctcgaactcctgatctcaggtgatccacctgccttggcctcccaaagtgctgggattgctggcatgagccaccatgcccgaccagtgtgtttatacctgtagcgtaaaaatccatgcttcaggatttgatgagtcttggaaagcattttctgcatcctgctggttgtggaagcgtttttcctgcaaaaaagtagttgagatgcttgaagaagtggtagtcagttgcagagaggtcaggtcaatatggaggatgaggcaaaacttcgtagcctaatttgttcaacttttgaagcattgtttgtgcaacgtgtagttgggcattgtcatgaataattgggcccttttagttgaccaatgccggctgcaggcactgcagttttccttgcatctcattgatttgctgagaatacttctcagctgcagtggtattcagaaagctgtagtggatcaaccagcagcagaccaccaagcagtgaccatgacctttttttggtgcaagtttggtttgggaagtgctttggagctgctgcttaagtctatccactgagctggtcattgctggttgtcagataaaatccacttttcattgcatgccacagtccgattgagaaatggtaaacgacgactttttttttagtttttgctcagctgatgaggcacccacttattgagctttttcacttttccaatttgcttcaaatgctgaacgaccgtagaatggtcgacgttgagctcttcgacaacttcttgggtaagttgtaataggatcagcttcgatgattgctctcaattggtcgttgtcaacttcccatggccggctactactcctcatcttcaagggtctcgcctgcttcgcaaaacttcttgaaccaccactgcactgtacgtttgtttgaagttcctggggcaaacgtgttgttgatgttgtgaattgtctccactgctttatgacccattttgaacctgagtaagaaaattgctcaaatttgctttttgtctagcatcatttccatagtgtgaaataaacataaaataaacaagtaataagtctttagcaaaaataacataaagcaagaaagtgcccattaaaatgatatataacataaccacatttatttaagaatgtattccaatatcaaattgcaaattccaacagtgcaaaaactgcaattacttctgtaccaacctaatagtttgcttagtgtttttatcatgaaaaggtattagatttttaaaatgttttttctgtctgttgaggttatcatgtgttattttgctttgttgtattattgtggtgtataattttttttgagacggggtcttgctctgtcgcccaggctggagtgcagtggcgcgatctctgctcactgcaagctccacatctcgggttcacgccattctcctgcctcagcctcccgagtagctgggactacaggcgccygccaccacgcccggctaatttttttttgtatttttagtagagatggggtttcaccgtgttagccaggatggtcttgatctcctgacctcgtgatctgcccgcctccgcctcccaaagtgctgggattacaggygtgagccaccgcgcccagctgtggtgtataatttatttttttttctttttttggtgggagtcagtaccctttttgtttttgtaaagtatgcatgattttatttaatttttttttttagagacggagtctcgctctgtcgcccaggctggagtgcagtggcgtgatctcggctcactgcaacctccgcctcccgggttcaagcaattctcctgcctcagcctcctgagtagctgggactacaggcgcatgccaccatgcccggctaattttttttgtattttagtagagacggggtttcaccatgttgcccaggctggtctccaactcctgagctcaggcaatccgcctgcctcagcttcctgaagtgctaggattacaggcgtgagccactgcgcctggccaacttcattttttatttttttggaaagtgtacgtgacttcctattcatccatttggaagtgtacaattcagtgcattacatgtattcacagtgttatataatcattttctataccaaagtttttcaatatccccaacataaactatccattaaatagtaattcctaatagttccctattcctactccttggtaacctaaattctttctctccctttgaatttgcctgttttattttagataatataaktagtatcatataatatttatctgtttatatctggcttattaacataaagtggagccaattttagcacatttttgtcacttcaaaatgaaaccttcttgcttgataatttaccatgttaaaaaaaaaaaaaaaggaaaccgggcggggcgtggtggctcaggcctgtaatcccaggactttgggaggccgaggtggacagatcacaaggtcaagagattgagaccgtcctggccaacgtggtgaaaccgtctctaataaaaatacaaaaattagtagtgcgcctgtagtcccagctactcaggaggctgaggaaggagaatcgcttgaaccaggggggcagagattgcagtgagccaagatcacgccgctgcactccagcctggcgacagagcgagactccgtctccaaaaaaaaaaaaggaaaccttgtacgctttagttaccatcctcctacaccttaacttccctgcccctaagtaaccattatactattgcctgtctctacatccctctatttgagactcatatgaatgaaattatataatatgtagacttttgttactgtttttttctattagcatgatgttttgcaggtttatccytatttagcatgtatcagcggccacataatacttcattgtatggatatttcacattttgttatccattcatcagttgatggtcatcatcccaaacaagaactctgtacttattgaatgattctcctttcctccctttgtctattttggccattttgtagtaactctatttgcctatcctaggtattttatttaagtggagtcatacagtatttgtctatttgtgtctggtgtatttcacttagcataatgctgtcaaggtttttgcatgttgtagtgtgtatcaggacttctttttcatggttgaatgatcttccatcttgtaaataataacacattgtattatccatttgtgatggacatttgagttgatttcaccttttcgacaatgtaaataatgtcgctatgaacatgggtgtgcaaatatctgtttgagtctctgccttcagttctttttggtatatgcttagcagcagaatagctgggtcacatggtaattccatacttaactcttagaggaagtccgccccttcctttcttaagtctttgctgtatacctttgaagggtttccctagtttatataattgcttgtgatagtttttcccctatttattgrctgttttgggggagatactggcccttgaagttcatgacgactccatttcctctgatgtcactataaacacttttgactgtggcagcctttgctaaaaatatttttggatcctggatgtggtagttcatgcctattataatcctagcactttgggaggccaaggtgggagaatttcttgagttgggagttagagacacttttggagtttgtttttttataattgtcttttttttttccatctcagtcttaaagttatttcttcaaagacataattgtgcttaggctttgatgctttcatcaggtaaaatgaaataaagactgaatctgatgaataaataaaactagtagataacagcttctaagtgtgactttgaagtaacatgaatggtttttatcatatgatacatagaaatgacttcttagtggtaatatatggcaggatttggcaaactagcctgcagtccaaatatggctaaaagctgtttttgtacaaccagtgagccaacaatagtttttacatttgtgaatcgctgaggcaaaatccaaaggaaaatattttgaggccgggtatggtggttcacgtatataatcccagcattttgagaggttgaggtgggaggatggcttgggcccaggacttggagaccagcctaggcaacatagtgagatcctgtctctaaaaattttttttaaaaactagctgggcatggtggtacataccttgtagtccctgctagttgggaggctgaggtgggaggatcacttgagtctggtatgttgaggctgtagtgagctgagatcctgccactgtactctagcctgggtaacagagcgagaccctgtctcaaaaaaaaaaaaaaaaaaaaagaatattttgtatcatgttagaattaaattaagccgggcgcggtggctcacgtgtaatcccatcactttgggaggcctaggtgggcagatcacgaggtcaggagatcgaaaccatcctggctaacacagtaaaacctgtctctactaaaaatacaaaaaattagccgggcgtggtggcaggtgcctgtagtcccagctactcgggaggctgaggcaggagaatggcgtgaacccgggaggcggagcttacagtgagccgagatagcgccactgcactccagccttggcgaaagagctagactctgtctcaaaaaaaaaaaaaaaaaaagaattatatgaaattaaaacttcagtaactacaagaagtctattggaatgttgccactaatatgttgtctggctgcttttgtgctgtgatgggaggattgagtaatttcgagtgtatgtcttacattgcagaatctaaaatatttactatctggcttttttttttttttttttttttttgcgacggagtttcactcttgttgccgaggctggagtgcaatggcacgatctcggctcaccgcaacctctgccttctgggttcaagcaattctcctgcctcagcctcctgagtagctggggttacaggcacgtgccaccacacccagctaattttgtatttttagtagagacgggatttccccatgttggtcaggctggtctcgaacttttgacctaacatatctgcccgcctgggcctcccaaagtgccgggattacaggcatgagccactgcacctggcctactatctggctcttatacagaaaaaagtttatcgacgtgtgtgattgtcacaggttattattgattggtcttctgagaacaatagtcattcatatgtgttctaatgcgactgccaaaatattatttcataagcacatttaatatgttaacttttaatggatgaagcagtaatttggtagttaaatgaacattaattcaacttgctttggttagtgggaaggatattttagtgttattttcatattcacattatcctgytggtcagcattcctttttattctcctccttggtcgtcagaaaagaggttaaaaaggccgggcgcggtggctcacgcctgtaatcccagcactttgggagtccgaggcgggtggatcacgaggtcaagagatcgagaccatcctggccaacatggtgaaaccccgtctttattaaaaatacaaaaattagcagggcgtggtggtgccccagctacttgggatgctgaggcaagagaatcacttaaacgcgggaggcggaggttgcagtgagccgagatcgcgccactgcactctggcctgggcaacaagagcgagacagattacaggcgcacgccaccttgccaagctaatttttgtggttttagtagagacagggcttcgccatgttggccaggctggtctcgaactcccaacctcagatgatcgcctcccaccttggcctccccaagtgctgggattacaagcgtgagccactgcacccggccagaagttattatataatcaatgcaccattgcccaaaatacttatctgaattttttttttttgacacggagtcttgctcttgtcrcccaggctggagtgcartggcrtgatcttggctcactgcaacccctgcctcctgggttcaagcaattcttctgcctcagcctcctgagtagctgggattacaggtgcccactacaacgcccggctaatttttctttgtatttttggtagagatggagtttcaccatgttggccaggctggtatgaaactcctgagctcaggtgatctgcccacctcggcctcccaaagtgctgggattacaggtatgagccaccgtgcctggccttatctgacttttttttttttttttttttgggacagtctcgctctgtcacccaggctggagtgcagtggcgctatcttggcccactgcaagctctgcctcctgggttcacgccattctcctgcctcagcctcccgagtagctaggactacaggcacccgccaccacgcccggctaattttttgtatttttagtagagacggggtttcaccgtgttagtcaagatggtctcgatctcctgacctcgtgatccactcgcctcagcctcccaaagtgctgggattataggcgtgagccactacacccggcctgacttttaagccattgtatttattatatcattgatttagttttgggcaaatgtggtcacagaagatttggacaaatgttgtcacaaaaggttatgcttaattttccgtaatttatttcggcagtgagtaggaagaaaatttgaatgcgtataygttacagacagtctttttgaggctggggacgtggctcacacctgtaatctcagcactctgtgaggccagtgcaggaggatcgcttgaacccttgagtttgaaaccagcctcggcaacatggcaaaacctcatctctaaaaaaaaaaattttaaatttagccaggctggtggcatgtgtcattagtcccagcgacttggtggggctgaggtgggaggatcacttgagctcaataggtataattttcagtgagctgtgattaggccacagcacattagcctgagtgacagagtgagaatctgccttaaaaaaaataaagtatttgaaagccttcttcagaggttattcttggaaaagcaaataatattatagccttgagtataatagtgtcatatcatttaagccatatggaaaataatactttgtatgaaaatagtaacatctagagtagttttattaataaaatactctccagatggcaagtgatagatacatcctgtttcgattttacaacaaagcatgtttgtgatataaacattattcgattgcaaaaattcttttttttttttttgaaatggagtcttgccctgtcacccatgttggagtgcagtggcgccatctcggctcactgcaacctctgcctcctgggttcaagtgattctcctgcctcagtttcctgagtagctgggattataggcacatgccaacatgcccagctaatttttgtagttttagtagagacagggttttaccatgttgaccaggctggtctcgaactcctgacctgaagtgatctacctgcctcggcctcccaaagtgctgggattgcaggccttagccactgcgcccggcccgattgcaaaaatcgtaacatttcagtgacttcagtgttttgaaattgagggattaaaatctaagatctaaatattcgattcttcttccttttttttttttgagatggagtttcacgctttttgcctaggctggagtgcaatggcacgatctcggctcactgcaacatccacctcccaggttcaagcaatttttgaatcccatagtgctgtgttgggattacaggtgtgatccaccatgcctggctattcttttttttttttttcttctttttaaagagacagtatcttgctctgtggcccaggctagagtgccgtggcagtcatggcttactgcagtcctgaactcctgtgcttaagcaatcctctcacttcagccttctgagtagctagtaccacaggcacacaccaccacacccgaccccattattgttctattgatgtttataactgtataattagtatataatctgcatttaccagaaatctgtaaaatctggttatgtcattacttttcctgattattggtacagttaaaacctagaaaggctcattcatataagggatacattgtgttggaagagcttataacaactttgttttatattttgccaaaaagcctttggattctttagctcgagggtgtagtccagattccaggtccaacttctagagttctggaggagtggcagatatccatttcttggggatcagtcagaagtgagctcattaattaattggaaactttttgttttggatgtttcagtggtaaatgaaaacaataccccctactagaattattgtgaggattctgttacattatgtgtgaaagaactgattacaggtgtcacaaattactttcttactcattaatttattaattatgtgctatgcactgttttgttttgtttttgagacagggtctctgttgtccaggctggagtatagctgtgcagtgtttttaagtgctgggaatactgtgatgagcagaatagacattgtgtctgccctcatggatccttcagtaaagtgagaaaggcaaacatcaaacaaggattgggcctggcacagtggctaatgcctgtaatcccagcactttgggaggctgaggtgggtgggtcacttgaggtcaggagttcaagaccagccttgccaacctggtgaaaccccctctctactaaaaatacaaaaattagccaggtgtggtggtgcatgtctcccagctgctcgggaggctgaggcaggagaatcgcttgaacccaggaggcagaggttgcagtgagccgagattgtgccactccactccagtctgggtgacagagcaagactctttctcccaaaaacaacaaaaaacaaaacaaaacaaaaaaacagcaacaacaacaaggattgcttgagcctgggaggttgaggctggagtgagcgatgaccatgccactgcactccagcctgggtgacagattcattcataccctgtctttcaaagaaaaaaatatcagtattagattgtatgttcacaattatatgtgtgagaacctatatgtatgggaactctttgtgccaaccagtgcccagagttttctctctgctctgattactctctcaactctctcaaattgccttttaaagaaatctttatttctgttaagattttagagctatttgtttttggtttttgcttaattttttgcatattctgttaatgcaaaaaattgcattaaattattattattatttttgagatagaatcttgctctgtcgcccaggctggtgtgcagtggagcagttttggctcactgcaacctccaccttccgggttcaagtgattctcatactacaacctcctgagtagctggaactacaggcatgcgctgccacgcctggctaatttttttgtatttttagtagagacagtttcatcatgttggccaggctggcctcaaactcttgggcctcaagtgatctgcccaccttggcctgctaaagtgcttgaattatagatgtgagccccactcctggctgcattaaaatattttaatagacatttgattgattgattgattgatttatgagatggagttttgctgttgttgcctagrctggagtgcaatggcgggatctcggctcaccacaacctccgcctcccgggttcaagtgattctcctgcctcagcctcctgagtagctgggattacaggcatgcaccaccaagcctggctaattttgtatttttagtagagatggggtttctccatgttggtcgggctggtcttgaactcccgaccttaggtgatccacctgcctcggcctgccaaagtgttgggattacaggcgtaagccaccgcacccggcctttaatagacatgttttaaatttataaggattaagaaaaacccctaaaaataaaaaacaaatttataatgattttatagttaaaaggttttgttgttgagacagggtcttaccctgtcactgaagctagagtgcagtggagtgatcacagctcactgcatcctcgacctcctcggcttaagtgatccttgtttaatgtttgtttttaagaacattaaaaagtgctttgttgaaagtgtttggtttagcacatttttattgattactgagtaggtgctggagtttaaaacatgaataagacaaaaaaaatgaatagaaaataagattattgcctctgctgttgagactcttagagtgtggtattaatatcaatgtaatgtgtcaagtgcagtaaaaagaggtatgcacaaggggatccagagccttaagtaggggtaaagtagacccaagagatgtttctttgagctgagttatgaagtataagtagctattagccagataggaaaatgaagcgtgccttagattgwaaagtatgatcaagtgcatggaggtgtgatagcataagatttatgtgaactacaaagtgtaaatcgtgtgatggaacttggtcatagtttttcctagggtaggagtcagattaggaagggctttatttttcatcctaggaccttggatttaagtgttttttttgtttgttttgttttttttgagacagagtttcactcttattgcccaggctgaagtacaatggcaggatctcagctcaccataacctccgcctcctgggttcaagcaattctcctgcctcagcctccctagtagcagggattataggcatgcgccaccacgcccagctgattttgtgtttttagtagaaacaagggttctccatgttggtcagactggtctcgaactcctgacctctggtgatccgcccacttcagcctcccaaagtgctgggattataggcgtgagccactgtgcccagctagttttgttttttaaatttttatgtttccaaataaatcatacacagagcacaagtataaaacatagaaaaaaagatggagctgctttgacttggaatgtggagcagccagctttcttatcaccctcttgggtagcctacaaggggctctcatgagcactatctcagaggaacacaatttgaaaactacctctgtgatggaatttcaacagaaggattttgagaagtccagaggaattgattaactaatgattaattgtaaaatgcattcttagagttggaaataagttggtgtgatatgtgggagatggggaagggggccaatcaggtatgtctgggctattaagaaaattgttacttctattctttagtctattaagatataattaatatttttattttttatttttttgagacttgccctgtcgctcaggctggggtgcagtggtgtggtctgggctgactgcaatctccacctccaggtttcaagcgattctcctgccttagcctcctgggtagctgggattacaggcacctgccaacacgcctggctaatttttgtttttttattttttattttatttatttatttttttttttgagacagagtctcgctgtgttgcccaggctggagtgcagtggcacgatcttggctcactgcaacctccgcctcctggattcaagtgattctcctgcctcagcctcccaagtagctgcgattacaggcacatgccaccacgcctagctaatttttttgtatttttagtaaagacagggtttcagcatgttcatcatgtttgccaggctggtctcaaactcctgacctcaagtgagccgcccaccttggcctcccaaagtgctgggattacaggcatgagccactgcacctggcctactcaccgtttcaatgaatgtcataccttggtatctcgagggtcttgctatgttagtcaggctggtcttgaattccttggctcaagtgatccacctgcctcggcctcccagagttttgggattacaggcatgagccactgcctgtaaacttgtagtgactttgccctttgcttagtctgttaattactgagagaggtttttcccaccctgtgattataattttgttatgtgtcctggtatctcttgtttttctttttattatttatttatttattttatttatttgtttattttgagatggagtctcrctctgttgcccaggctagagtgcagtgacatgatctcagctcactgcatcctccgcctcccgggttcaagcgattctcctgcctcagcctcccaagtagctgggattacaggcgcatgccaccatgcctggctaatttttgcatttttagtacagacagggttttgccttgttatccaggctggtcttgaactcctgacctcatgatccacccgcctcggcctcccaaagtgctgggattacaggcgtgagccaccgtgcccggctgatgatgatattttaacagatgaagagttgcattttgtagatgagcaaaaaaatgtggtttcttttttttttttttgagatggagtctccctttgtagctcaggctggagtgcagtggtgtgatctcagctcactgcaaactccgcctcccaggttctcctgcctcagcctccctaatagctgggactacaggcacctgccaccaaagtacgagaatcacttgaattcgggaaggaagtttgcagtgagccgagattgtgccactgcactccatcctcggtgacagtgacagagcaagactgtctccagaaaacacccaaaaagagagaaagaagctctactgtgcataaaatactatcmaatggcattgaatgctacagagaaatcaggaaaggaagagtcaatcgtcaatccatgtgggaaacttcattatgggtttttttttgkttttttttttttttttttggcaggttctcaccttgtcacccaggctggagcgcattggcacaatctcatctcactgcaacctccaactcgcgggttcaagtgattctcctgcctcagcctcctgaatagctgggattacaggtgcctgccagtatgcctggctaattttttgtagtttttgtagagatgaggttttgccatgttgtctaagctgttttgaactcctgacctcaagtgatctgccctccttggcctcccaaagtgctgggattacaggtgtgagccactgtgcttggctgcattgtggtcttactttaagaaattgctgtggtgggttctgtgctatttcctgtaatcccagcaccttgagaggccaaggcaggtggatcacttgagcccaggagtttgaggccatccggggaaacataaaaatttaaaaaattagccaggcgcagtggctcacgcctgtaatcccagcactttgggaggcccaggtgggcggatcacgaggtcaggagatcgagaccatcctggctaacacggtgaaaccctgtctctactaaaaatacaaaaaattagccaggcatggtggcgggcgtctgtagtcctagctactcgggaggccgaggtaggagaatggtgtgaacccgggaggtggagcttgcagtgagtggagatcgcgccaccgcactccagcctgggtgacagagtgagactccgtctcaaaaaaaaaaaaaaaattagctggtcatagtggtatgcacttttagtcccagttacttgggaggccaatgctagaggaccgctggaacccaggaggcagaggctacagtgagttgtttttgtcccactgcattccagcttgggcaacagttgagtgagactctgtctcagcaaaaacaaacaaacaaaaaacagaaattgccacagccattctgaccttcagcaagcagccatgaacactgaggcaagaccctccatcagcataaagcttgcagctcagatgatcattttttagagacagggttttgctctctttcccaggctcaagtacagtgataaaaccgtagcttgctgtaacctgaaaatcctggactcaagtgattgttttgcctagaactacaaggttgtgccagcacccccaactaagtctggctttgttttttcctcccctcccttcccctcccctccccgctttttaaaatttttattttatttttattttttcaaatgggatctcgctctgtcacctaggctggagtgcaatggcgcaatctcagctcactgtaaccttccatctcccgggttcgagtgattctcctgcctcagcctactgagtaactgggattacaggcgcctgccattacgcctggctaatttttgtatttttagtagagacagggtttcaccacgttagtcaggctggtctcgaactcctgacctcaggtgatccgcccacctcggcctcccaaagtgctggcattacaggcgtgagccaccgtgcctggcctctttttttgtttttttaagtaaagatgaggtctcacttatattgccaagtatggtcctgaagtcctaggcccragcagtcttcctgccttggcttccgaaagtgctgggattacaggtgtgaacccccacaaccagcctcagttaaggggtaaaatttttttgtttgtttttttagtgatgagttcttgttatattgcccaggctggatattcttttcttttagcactatatattttttcccccaaatttatacattgaatacaacaaagcattcttaatttgttatttttaatatataatgctattgtacacagactattgtgtagtgtaaatctaacttttatatatgtattgtgaaattgaagcattctcgtgactcactttatcgcaatatttgcattgttgtggtagtcttgaaaccgaacctgtagtatctccaaggtatgcttttgcaagtttttgtatggacatgtgttttcattattcttgggtattgtatacctaggagtagagttactgcatcatatggtcattctgtgtttaagaaaaaattttattttcaatgtttgtgtatatatatttatgatatacatgagatattttggtacagacatgcaatatgtaataattacattagggtaaatggagttaccatcccctcaaggatttatcctttgtgttacaatctaattataccctttttcttattttaaaatatacagttaaattattatcaacctgttgtgctatcaaattctagttcttattcattatttctaacttttttttggacttactgaatcatctgttcttttgttttctttaaccgtcctcacttccatctttctacttcccttcctagcttctagtaaccatttttctgttgtctatcagcatgagttctattgttttaatttttagttcccactaataagtgagaacacatgaagttggtctttctgtgcctgacttatttcatctaacataatgatctccagttccatctatgttgttgcaaatgataggatctcattctttttcatggctgaataacactccattatgtatatgtaccacatttgctttatttattcatctgttgaacacttaggttatttccaaatcttggctattgtgaacagtgctgcaataaacatgggagggcaaatgtctatttgaaatactgatttccttttctgtatatagctagtcgtgggattgctggatcaaatggtagctctatttttagttttttgaggaacctccaaactgttgtctagatttgtactaatttacattcctaccaacaacgtatgagggttcccttttctccacatccttttattcttttcttttggataaaagccattttatctgtttgagatggtatctcattgtagttttgatttgcatttctctgatgatcagtgatactgagcaccttgtcatattcttgtttgccattcgtatgtctttttgagtaatttctattcagattttttgtccatttttaggaaaactttaatttgattgttatatttttcttttagatttgtttgatatcctcacatagtctagttacttgttttgggtttttttttctcttggagacagggtctcactctgtcacttaggctggtgtgcagtggggcagtcatggctcagtgcagccttgacctcccaagctcacgcatccctcccagtttaccctcccaagttgctgaaactacaggtgtgtgctaccatgtctgcctggtgtgggtgtgtgtgggtgtgtgtgtgcacgcaaggatgggatctcgccaaagttgatcttgaaatcctggcctcgagcgatcacccaccttggcctcccaaagtgctaggattgtgcaggcctgagccaccacgcctggccttttcttgtttataaatgagattatgtatttatacttgggttgatttgatgacgttattcttaaatatgggtagtttaagctgtggaaaagttttagtaggctttggatatcatataaatcaagcatctaaacggatgtgtttttgtcttatatattgctgtcgtctctttataacaacttaatattatgggagtttttggtaactaaaacaataactgagtccttagagttgcgataatttctatgataattgttatgtaaagcattagtacttcccccacttcccctcgtctttacctcaagttgtgtatcactatagattctcagcaagtttttctaaaaaactgtggctgggtgcagtggctcatgcctgtaatcccagtactttaggagggcgatttgggtggattgattgagctcaggagtttgggaccagcctgggcatcatggtgaaaccctgtctctacaaaaaatataaatgccaggtgctgtggctcacgtctgtaatcccagcacttgggaggcggaggctggtggatcacctgaggtcaggagttcgagaccagcctggccaacatggtgaaaccctgtctctcctaaaaatacaaaaattagccgggcatggtggcaggcgcctgtaatcccagctactcgggaggctgaggcaggagaatcgcttgaacccaggaggcggaggttgcattgagttgagattgtgccattgcactccagcctgggggatgagagcgagactgtctcaaaaaaacaaaaccaaatatatatttgcttttttgtttgtttttttgagacagagaccaaatatatattatatatatatataatatatatttgttttttattataatatatatacattatatattatatattatatatattttatatataatatataatatattttatatatttatatattatatatgtatattatatatatatatttatatatatataaatttatatatataatatataaattttatatatttaaatatatattatatattatatatttatataattaatatatataatatatttatatattttatataattatatatatttatatatatataaataaatatatataatatagttatatatttatatataactatattatatattatatattttatattatataatttatattatatattatatattatatattttttatatatataatatataatataacatataatatatgttatatataatatattatatataacatatattatattatatgtatatttatatataatatatatatgtaaatcagcccagtgtggtggtgtgcgtttgtagtcccaactacctgggagcctgagggggaaggattgcttgagcccaggaggtggaagctgcaatgggctgtgatcacaccattgcactctagcctgcattacatagggagaccctgtctcagaaacgaaaaagaaaaaattgttgcactatggctattttttaatatttagctcaactgtaatttttggatatgtctgggaagagattgatagccaatgactatattcaatttacattaaaatagcatatcccatatgaccaggaacatagttgaaccggtttaggtttttttaaaaaatcctcagaagtgcaacataggtttgatttttaactgttgctagaaaaattcattagtgaaagtaaagatctcgtccaaaattcctttaaacagaacttttggctcaagagccacttcttagttagagttgtagagatgtcttaagcctttagtgattttcgaagatggtagtgacgagcttttctgggttagtttaatataaagtgatacgtcactgtcagtgaaataaggaatataaggtggccgtggtggctcaggcctataatgccagcactttgggaagacaaggtaggaggattgcttgagaccaagagttcgaaagcagcctggggaacacagggagacctgtgttctgggtgtggtggtgtgtgcctttagtcccagctattcgagtggctgaaatcaaygcgccactgcaccccagcctgggtgacagactgaggctgtgtctcaaaaaacaaaccaacaatcaaaaagaaaatgggaggttttaaatctagttagcttttaggttggatttaaacactttgcaaacaaattctagccatatttatttctaatgcaaaaaacatggtctttagagttattcagatatggatttaaattctaatcgttacaattgtgacttaacttttttttttttttttttttttgagctggaatctcactccgttgcccaggctggaatgcagtggtaagatcttggctcactgcaacctccgcctcccaggttcaagcgattcttctgcctcaacctcccaagtagctgggattacaggcacacaccaccatgctcggctaatctttgtatttttagtagagatggggtttcaccatgtttgccaggctggtcttgaactcctgacctccagtgattctcccaccttggcctcccaaagtgctgggattacaggcatgagccaccgcacccagcctgtgacttaacctttttgagcctcagtttctttatctgcaaaatcgagataatgctgtcttgtaaggttgtgaggggtaagcaaaataatgtatgtgtattagttttggggggctgttgtaatrcaataccacaaactagctggcttaaacagcagaaattctctctcagttcgggaagctagaagtacaaactcaagttgtcagcacattgttttgaggactgtgagtgtgtatctgtccctgtccctctcctaatgtctgacctcaggctttccttggttaatagattgtgttctgtctgtgttttcacgttgtcttccctctatttgtgcctgtctttgtttccaaatttctccattttattaggaaacagttgcactgaattaaggcccacccttgtgacttcatctggatcaactgcaaagaccctactttcaaataagatcacattcacagctactgggttagggaggagtatatcttgtgtgtgtgtagagtggcagtgtacacagaattcggcccaataccatatataaaaaaggcttagtaccagtatattatttccaactggacctatagacattagaaaaagccattctgaaatctgccagtcctgccagtctaagcctggaagatgccacttctttacttacattttctctgatctcttttcccaagtgtcttgggatctggaattgtgacttattcgtctttgtgtgtcttgttgagctttgtacataggtgtttactaagtttgtgtgtagttgaattatgggcttaaatggatttattttagtgtctgtctctgcaagataaaatttttaagctggtcttaaagtcgtcttgcttttttacacccttgttcttattttcatgtttagaagcttttctgtggtctggaattcttgcctgtttctaagtttatttattaagatcagttggatttggtccttattgtctatgaacgaaagtattaatgtgtatttatatagatttatttttccagtgggtttgcatatgttattttatttggtcatgtaaatttttcaagatagaagaaagtaaataggggtttgttaaagtctttactcattgtaccatcaattaatgaaactttaaaatttgtgtttctcaatggccttgttatttaaaagtttttttaaggtcatcattattgcttcagcctagtttataatggatcatacagtgtatgtatagctctgttatctttaagatatgacatcttagcatatttcatagagttgtaatagcataattttttttggttatatagatgagaggtttctgtgttggccaggctggccttgaacrcccagcctcgcctccttatgcaccaggacaacaggcctgagccaccacggctcctagcataatttttttaaacagatctcttggtggatattaacttttgtcattttaaaaaaaaaatgctttaacagcttgggcaacgtggttatattccatctctacaaaaaatacagaaattttccaggcatgttggtgagcattggaacactgagatgggaggatgggttgagctcaggaggcgaagattgcagtgagtgaagattgcaccattgcactccagcctgggaggcagagtgagaacctgtctcaaaaaaaacacacaaaaaaccaaccaaacaaaaacctgctttaaatatcttaccctagaattaggaattataggaaattactttgaattatttttggggcttaaaatactgggagctgaattactagttactcattttgatggtgtattatagagtaggtgttactttcccaattttgtggcttaggaaactgagaccaaattaacagactttttgaaggtgacacagtttgtgatggagtcagaagagaggatttattactactttctctggttctgtggttctggctattgtctttacctgataccactgacattctttctcctctgtctattgaatgcatgtattttatgattatacttccaaaaatacaatgtaatctttttgtagtagttctctgaggagaagacagaaccaacaacatgtgctagattggttatagttaaatttgtcataaagcatataataataatgaggttttgttgttattggataacaggagagtggtttaagaatttaggctcyggagttgtatctccccaggtttgaatccttggttctgtcacttaataactatgtaaccacaggcatgtagtaaaataatgggtaataatgtgtttacttgaagaacagtgccttgcatgtagcaaacatcatgttacttaatgtatttgaagtcatttaggacttgaataaataagcaagttccatatttagcagtgccaaataaatcatatttaaataatcaaaaatcaaattatataataaatttattggaacctactcagattgcagttttcagtacagataaaatatttgtctttcccatcgattcttggtatctcttaaagtttcaaagtcaattaactttgaagtcgtattctttttgagaatttacttgataaccatcaatatggtcccttagatttttttaaagacagatctcactctgtagcacaggctggagtgcagtgggcatgaacatggtccactgtagcctcgaattcttgggctcaagcagtcctcctacctgtctcccaagcagctgggagtacaggcatgcaccaccatgcccagctaattttttaaattttttgtagagactgggtctgacatgttgtccaggctgatctcagactcctaggctggagtgatcctgtcacctcagcctcccaaagtgctggaatttataggcaagagccacagcatctggcccccttagggctttttattttattttattctttttacttttgaggcagagtctaactctgttgcccaggccggcgtgcagtggcgcaatcttggctcactgcaacctctgcctccctggttcaagcaattctcttgcctcagcctcccgagtagctgggattaccggcatgcgccgccatgccctgccaatttttgtatttttttctctttttagcagagacagggtttcgctgtgttggccaggctgatctcaaactcctggcctcaagttatctgcctacctcggcctcccagagtactgggattacagatgtgagccactgtgcctggccccttagagctttttaaaagaaagtaagatgtagttcttgtttcattttctagtagctctatatacaggaggaactaatcccaggttttttttttttccgagacggagtcttgctctgtctcccaggctggagtgcagtggcgccatctcggctcactgcaagctccgcctcctgggttcacgccattctcctgcctcagcctcccgagtagctgggactacaggcgcccgccaccatgcccagctaattttttatttttagtagagacggggtttcaccgtgttagccaggatggtctcgatttcctgacctcgtgatctgcccgcctcggcctcccaaagtgctgggattacaggcatgagccactgcacccagccttttttttttttttcttttttttttttgaagagtctctctgtcgccgaggctaaagtacggtggctcttggctcgctgcaacctccgcctccagggttcaagcgattctcctgtctcagcctcccaagtaactgggtaggattacaggtgcccgctaacacccccggctaatttttgtatttttagtagaacaaggtttcaccatgttggccaggccggtcacgaactcctgacctcaggtgatccacctgcctcggcctcccaaagtgctgggattacaggcatgagccactgtgcccagccaatcccagtatttttaatgagatttaacttctgtgagtatttagaagaattctttgctgttttctctggggcttatgtctgaaagtaaagtgttagctgggactacaggcatgtgccaccactcctggctattactattgttaatacgctaatagaaatattggtttgaaaagcatgtagaatatcacatgcagaagggtctgaagtctcttgatattattaaaaattcttcctataattttttctccattttttttttccctttgtgttttgatccaaggactagatcaagggtgtcttttccttcggatgattttctttattgtgtgtgtttttagttctttaaaaataaagccagcttaattttattttcaaaatacggatagattcattatataaaacaattataagttgagaactatgtataaagggctatgttatgaacaattaagatggaataatttagttgtacttattttgtaattctttttaggctagagtgttttcattctcaatttttcatacattgctttttcagaaggctaataggaatgacaataatgtttcaaaatattttgattcttattgatgccccatgttttgtctgtctaaagtgtcaacctaagaaaaagtctacgccactgaagtatgaagttggagatctcatctgggcaaaattcaagagacgcccatggtggccctgcaggatttgttctgatccgttgattaacacacattcaaaaatgaaaggtaatacttgcagtgattatacatgttaaaggcagttgcctttagaataactcaatttttgttatcttaataataatatatttttttccttggaacattttgtgaatgaattggtgttacatattttatcttttggggcttttaaaagttcgttttactctatgatttaaaccttctctcagttttttttttttgtttgtttgtttttgagacggagtctcgctcttgttgcccaggctggactgtagtggtgcaatctcagctcactgcaacctctgacttgtgagttcaagcgattctcctgccttagcctcccgagtagctgggattacaggcatccgccaccacgcttggctaatttttgttttttgtttttttttttaattttttatttgagatggagttttgctcttgttgcccaggctggagtgcagtggcgtgatctcagcttaccgcaacctctgcctcccgggttcaagcaattcttctggctcagcctcctcagtagctgggattgcaggcatgtgccactacgcccagctaattttgtatttttagtagaaacggggtttctccatgttggtcagactggtctcgagctcccgacctcaggcgatctgcctgccttggcctcccaaagtgctgagattacaggcatgagccctgcaccaggcctaatttttgtatttttagtagagacggggtttcaccatgttggccaggctggtcttgaactcctgagatgaggtgatccgcccgccttagactcccaaagtatggggattacaggcgtgagccactgtgcccggctgatttaaacattctcaattattctgttgatgccaggaaggtgttaggccatttttctaatgtttacattgtccggaatcaccttttagtatatttacgtatttctactttaatcaggtttgtatcattttttataatataaaagctgaaacaattgtaaatgtttattaataattttgaagtttaaaattttaatttggagtatttcctttaaatgctattgtttgtttttcagttgattgttgtgtttgaatcttaggtaccttagttttaaattactctaaaggatggggctgaaacttgatttatttttattttattttattttagagaagaatttctgctctgtctcccaggctggagtgcagtggcgtgatctcggctcactgcaagctctgcctgctgggttcatgccattctcctgcctcagcctcccgagtagctgggactacaggcgtccgccaccatgcctggctaatttttttggtatttttagtagagacgggatttcaccgtgttaaccaggatggtcttgatctcttgacctcgtgatctgcctgcctcggccttacaaaatgctgggattacaagcgtgagccaccgtgccgggccaatttttgtatttttagtagagatggggtttcaccatgttggccaggctggtcttgaactcctgacctcaggtgatcctccttcctcagcctcccaaagtgttgggattacaggtgtgagccactgcacctggcctgaaacttgatttgagctgtccttttttctgttaggatggtagtgattttattttagttttaatatatgtattttagtttctgaaagtcagatgttggtgagattcagaaaaatcagcttactctctgctttgctgtgatccgccacattcttcactcctttcaacaggcaaccaattgatattaatttttgttgttgttgttgttgttttgttttgagacggaatcttgctctgtcacgtacgttggagtgcagtggcgcaatttcggctcactgcaacctctgcctcccgggttcaagcaattctcctcctgcctcagcctccagagtagctgggattacaggtgcgtgccaccatgcccagctaatttttgtattttagtagagacggggtttcaccatgttggccaggctggtctcaaactcctgacctcaagtgaaccacaggtcttggcctcccaaagtgtttggattacaggcgtgagccaccacacctggctgatattaatatatttttatatacataatgttttttcatataaattatatttttatttacatgagtaaatacatacttcttagtcatcttccacgtctttcctttatcacaaacagaacattgtatattttgcagcttgccttttccactttgtggagatttttttcatatttttattatttatgtatttgtttatttttctgagacaggatctcattctgttgcctaggctggagtgtaatggcataacaacgcctcactgaagccttgatctccagggctcaaacagtcatccaacctcagcatcctgaatagctggaatagctggaatagctgggagcacagacgtgtgccaccacacatggctttttttttttttttttgggtggagatagtgtctccatatattacccaggctggtcttgaaatcctgagcttaataagggatcctcccaccttggccttccggagtgctggaattacatgtgtgagtcaccatgcctctttttttttttttttttttttttaaaaaggatgatttctccaaagtagaattcctggatttgattttatattttgaataatgaggtgcccaaaaacctttataaattttagtgtctttttttttttttttttttttttttgaggcagagccttgctctgtctcccaggttggagtgcagtggcacaatctcggctcactgcaagctccacctcctgggttcacaccattctcctgcctcagcctcccgagtacctgggactacaggtgccagaacctagcacagtactaggttttgtgtctgggcgcagtggctcacacctgtaattccagcactttgggaggctaaggcgggcagatcacctgaggtcaggagttcgagaccagtctggctgacatggtgaaaccctgtgtttactaaaaatacaaaaattagccaggtgtgttggcatgctcctacaatcccagctactggggaggctgaggcagaagaattgcttgagcccgggatgtggaggttgccgtgatccaagatcacactactgcactacagcctgggtgacagagcgagactctgtctcaaaagaagaaaataacttagtgtgttaaaaatttaataccttgaccagacacggtagctcatgcctataatcccagcactttgggagtccgaggtgggaggatcacttgagcctaggagtttgagaccagccttggcaatacaatgagacactttctctttaattcaaaaaaaatgttgataccttatcctttgtgacctgtctggatatttaaattctactactagaaaactctgagtccttcttttctaacctccctgtccctatgactgctggtttcttactcattagggtgtctctctctctctctctcctcgtctctcttttgattgagggtctcgttctattgcccaggctagaatgcagtggcgtgatcatgactcattgcagccatagcttcccagggtcaagcgatcttccctcctgtgccttccaagcagctggggctacaggcattcgccactatgcctggcttagtttttaatttttttgtagagacagggttttgccttgttgcccaggctggtctgaaactcctgggctcaagcgatctgcccgcctcggcctcccaaagtacttgggattactgacaggagctaccgcactcagcctatttatagtgtttcttatgcatactagttgagtccatgctatttatttgacaaatagtaaataccttgtatagattgagtactgtgctaggttttgggattcattattgggccatacatctatactgcttgctctcatgagaaattagaatctagtataagggacaagacaccagaaaataatcaaatgcattattacttaactgagaagtctgtccaaggaacaattttgatgcctattcagtgatataacagggataactgacctggactcttcatcagtggtgtttgctaataaagttatctctgatctgttacttgagaggatgagttgggagttaactagggaagagagaagaagatggttccaggaatctgcagctcacagagtaagggagggtggcacagtatgaggctgggaagtagatatgggacaaagtgttcagtgccttgttgactttgttaaaaaattttgttatttttatctcagaaacaatgtatataattaaaaagtgtttagcaggagccgccatgctctgatctgttcattttaaaagttcactgtggctggattgttgaacatgtgttagaaggggaccacaaataagtaaaaagagacagttaagtcattattagtgattatggtgtgatgaaaattgcgaatagaaaataaaaacagatgaggaggtaaaatgcatctgatgtagtaatgcattggataatgttgactgagggagaatgaagtcctgaggctttcagttctcaggtttccatatcataggatggctcccacgtttttagcttcatcactggatggctgaatagatcgtcatttactgagagaacaccagagcatctataactcagaaaggacatattcttgttcatattagttggagccatgggcaaggcatgggtgagattttttgggacaaaagatactatgagacaaaaggtacattgaggaagacatcatttgacatctgtatgaaagagactgagcttgctgaaaaagaatgatgaaaaagaatcagatgaaacaggtggaagaggaaaagtaggagaatgtggctagagtacagtagtatgtactggggatatgttctaagattctcagtggatgcctgaaactggatagtactgaatcccatatatataatgtttttcctgtacatacatacctattataaagtatcatttataaattgggcattgtggctggttgtggtggctcacgcctgcaatccagcactttgggaatccgaggcgggcggatcacttgaggtcaggagttgaaagccagcctggccaacatggtgaaaccctgtttcttctaaaaacacacaaaaaattagctgggcgtggtggtggatgcctgtaatcccagctactggggaggctgaggcaggaggattgcttaaacttgggaggtggaagttgcaatgagccgagatcataccactgctctccagcctgggcaatggagcaagactccatctaaaaaaaaaaaaatagtaaataaaaaataaattgggtattgtaagagatcagtaacaactaataataaaacagggcgggtgcagtggctcacgcctataatcccagcacttcgggaggccgaggcaggcggatcacaaggtcaggcgatggagaccatcctggctaacaaggtgaaaccctgtctctactaaaaatacaaaacattagctgggcagggtggcgggcgcctgtagtcccagctacttggcaggctgaggcaggagaatggtgtgaacccgggaggcggagcttgcagtgagccaagatgacgccactgcactccagcctgggcgagagtgcgagactccatctcaaaaaataaataaaacagaacaattacactgtaataaaagttatgggaatctgtcccctaccttcgaccccaatagcttattttactgtatcacaggtaactgaaaccatcgaaagtgaagtctcacgtgagctgggaccactgtagtttaaggacgatgtggtcaattttgctgagtgttgcctagagagcaaataaaatgtccattagggataagaaggtggagatcacgagtaccttttttgttgttgttggtttcattgaggtagaagttagattggactgatttgaggcaatggagacagagacagagaagggaggatgctgcaggcagataggtatataggattcagaaggatttttattttttgttgttattttttattttaatattagtcttatttttgagaaagagtcttgctctgtcactcaggctggagtgcagtggcacaattacagctcactgcaacttccatctcccaggctccagtgctccagggctccagcactccttccacctcagcctcctcagtagctgggactacaggtgtgcaccacaacacttggctaatttttatattttttgtagagacaagatctccctatgttgcatgaactggtcttgaactcctggccttaagtgatcctcccgccttggcctcccaacgtgctgagattacaggtgtgagccactgtgcctggccaatttatttttgactctagagacagggaagtttcaagatgaaggtgctagccaattcggatcccaagtgagggctgtcttcctgacttgtagataaccaccttgttgctgtgtcgtcatttggcagagagcgaaagtactcactgtggcatcttcttttaaggagactagttgcatcatgaggtcacctccatcatgagggacctattactaatctagtaatagtatttagtattcttagtatatttagtgtataaaattagtaaatctacttactccaaaggcctcacctgtaaacaccaacatatgggggggtcaaggcttcagaataatgcatttcaggaggacacaaacatttagtctgtaatagccctttttcatccttcttgaatgacagtcttactaactctgagttttaaattgtcgtcagtaagctgaattcatatccttagtgatagtctttatccaggctttagatttgtatactcaactccatacttgaagttttcaccaagatgtcaatttgaaaatatattcatcaccctaacatggaaccccatactctttagcttcctctgtctccatctttccacacccatacgtgtttgccttaagcaaccactaatgtactttctgtttctgtggatttgcatattctagacatttcatatgtagtaggtccccaatttgagttagaatttttcgaccttacaatggtgcgaaagcgatacacattaaatagaaatggtacttcaagttacctgtagaaccattctgtttttcactttcaatgtagtattcagtaaattacaggagatattcagcagttaattttaaaataggctttgtgtcagaaatattgcacaastgtagaccaatgtaagtgttctgagcatgtttagcgtaggctaggtgtattaaatgcattttctaattattattttttttttagaggcagggtcttgctttgttgctcaggctggagtgtagtgacgcgatgtcagctcactgcaacctctgcctcttggactcatgtgattctcctgcctcagccccccaagtagctggaactacaggcaagggccaccatgcccagctaatttttaaatttttttrtagacagggtctccctgtattgcccatgcttgtcttgaactactgggctcaaacagtcttcttgccttggcctcaaaaagtgtttggattataggcgtgaagcctctgcgtctggccagccttcatattcaacttaatattttcttttcttttcttttcttttcttttctttttttttgagatggagtctctctctgtcaccagactagagtgcagtggcacgatctcagctcactgcaacctctgacatcctggttcaagcaattctcctgcctcaacctcctgagtagctgggattacaggcacctgccaccacgcccggctaatttaatttttagtagagacggggtttcaccatgttggtcaggatgttctccatctcctgacctcgtgatctgccaacctcggcctcccaaagtgctgggattacaggagcgagccaccacgcccggcctcaacttaatattttcagcttataatgggtatgtcatggagcatctgtgatttgtttataatttttccacaaatctgttgtgctcctcaacttacaatggggatacgtttccactaggaatgcattggttctgatttttcccatatccccatcattggttatttgacttttaaaaaatagacaaaacataaatttaatgttttttttttgttttgttttgttgagatagagtcctgctctgttgcccaggctgtggcaggatctcagctcactgcaacctctgcctcctgggttcaagcagttcttctgcctcagcctcctgagtagctgggactatacgagtaactgggactacaggcatgtgccagcacgcctggctcatttttgtatttttagtagagacaggatttcaccatgttggccaggccgttcttgaactcctgaccttaagtgatcctcccgcctcggcctcccaaggtgctgtcctgcctcagcctcccaaggtgctgggactacaggcctgagtcacctttcctcgcctaatgttttcattgtttcaagtaggcagttcagtagcattaagtatattaacattgttgtgtagccattaccactattcatctccagactctttcatctcccaaactgaaactctgtacccatttaccaacatcaccatagcccttggtaaccactgttctgtgttttttttccttataaatttgactattttagataccacatataactagaatcagacatttgtcctattgaccccttacttcatttatcataatgtcttctaagttcatcaatgctatagtatgtttctgaatttctttctctctctctcaatttttttaaaggctacataatacgtcattgtattgtaagtaccacattttgtttttccattcatccatcagagaacatttgggttgttttccttttggccattctgaacagtgtttctataaacattgtatagtatctggtgtttttgtatttttttttttttggatggagtttcactcttgttgctcaggctggagtgcaatgaggcgtgatcttggctcactgcaacttctgtctcctgggttcaagtgattctcttgcctcagttgggattacaggtgcataccaccacacctggcattaatttttgtatttttagtagagactgggtttcgccatgttggccaggctggtctcaaactcctgacctctggtgatctgcctgcctccacctcccaaagtgctgggattataggtgtgagccactgtgtccaacctaagcatctgtgtcttttttgttgttttttatttgttttttgagacagagtcttgctctgtctcccaggctggagtgcagtagcgggatcttggctcactgcaacctctgcctcctgggttcaagcgattcttctgcctcagtctcccgagtagctgggactaaaagtcagctaaaagtcaaagctgtaatggctaagatcttaacatgccatgcaaactcttacaagtctggttgctgcccaacctttattagtttcccttttcttctagtttatgatagtgtttagaactacttgtagttttgtttagttttattcattcatgcctttgagggttctgtgccctcatactataattctatctttaactgtttacttttttttttttttttgagatggtgtctcactcttgtccaggctagagtgcagtggtgggatctcagctcactgcaacccccgcctcctgagttcaagcgattctcatgcctcagcctctcaagtagcttggattacaggcaagttgcaccacgcccggctactttttgtatttttagtagagacagggctttaccatgttggccaggttggtcttgaactcctgacctcaggtgatccgcctgcctcagcctcccaaagggctgggattacaggcatgagccatcccacctggccaaactgtttaactttaaaagttgttcagcctggcgcggtggctcacgcctgtaatcccagcactttgggaggccgaggcgggcggatcacctgaggtcggcagtttgagatcagcctgaccaacatgaggaaatctcgtctttactaaaaatacaaaaaattagttgggcgtggtggcgcatgcctgtagttccagctacttgggaggctgaggcgggagaatcgcttgaacctgggaggcagaggttgcagtgagccaagatcatgccatagcactccagactgagcaacaagagtgaaactccgtctcagaaaaaaaaaaaaaagttgttcaagtacttcatttgtctcctcccacttataattgagtggttttttttaagaaataagtgtttatttttgcagttgtcatgccttttgtactgtaatcatttatrtatgacttatctgtcagacagtgagttcttttttctcctcacgttgctggcacatcagaagttcttgatctgttaatgaaatttatttatttatttatttctaagacaggggcttgctgtactgccagggtggagtgcagtggcgtgataatggctcactgtattcttgacctttgaggatgaagtgatcctcccttctcagcctcccaaatagatgggactacaggcacatgccaccatcctcagccartatttttatttttagtagagatagggtcttgctatgtttcccaggctggtctcgaactcctgggctcaagcagtcctcccacttctgcctcccaaagtattgggattacaggtgtgagcccctacacctggccagttcaatgtattgactcatgggagagtgatttaattctcaaattgactttaagaacctctgtataggtacacacatgtgtatattaaccagttccagttcctgtaggtgatttttattgaaggatttaattcagtaggtgggaaataaggagttcattttttttttcagtttgtttttaaaatgaacyagacaacacaaaatttaactaagttttagtttcattattaagctatgttttttaatagaaaaactaccatgtgtacacttttgaaaccagcatttacagagaagttaccgttgacagttcagtttataaatcccttctctcctttgtctttcttttttcatttttcattttgcattctgagggaagtaggcattccataattcttccaaaggttatttggattcttttctgtgttttgaaataagacatggttgttacaagggaactagatgtgagttaaaatgaattttcgtataaaatgatttttatttccttttattaaaagtgacaaattgttaaacatgtgttgtcctgactttcttttgtgacactttttagtgtaataaaagttgctaataaaattgtaaatgtgtggaagataacatatactagatgaattataatcttttctagatgggatttgtattttcatatttttaattgtatgtatagaactttagataaccaagaaattataggctaaactggatttatttttggttttattactggtaggctttcctttttcttttaaaatttccctaatttgaaatattgcatttcactttctttgcaaaaccagtgtttgaccatgcgcttgttctctctgaagttattgaacttactatatctaaaataccaaaaccatacattattttgggggtgtggttgtggggaggaatccatgcaaagcaccttgtgtggtgctcgtctatgagtagctacactataaatgttaacagatcatacatgttgctttgctgaaacatttcttcttctttatattagcctagtgtttytcacgttttcttgggtttttttttgtatatatatttttgttgctgtgggcttactatatacatcttctgtatttttggaacaatgaaattatagactgatagtgaaggaaacttacctgtctactatcttaatttcttctttgtagttaatctacatttagctggttttgaagctataccacgtcatcagactagactactgattctttcataacctcctgtgtattttcttgccacacatatataatacttaaaattttccttgtgtatgatctactctaggttgtctagttcagtgggcatgttagttgtttccagacagtcttctttggcggcaatgatgtggctgttctcttaatgatgagaagtaatttctttgatctaatgattctggttctcttacccttacctagtttccaaccggaggccctatcggcagtactacgtggaggcttttggagatccttctgagagagcctgggtggctggaaaagcaatygtcatgtttgaaggcagacatcaattcgaagagctacctgtccttaggagaagagggaaacagaaagaaaaaggatataggcataaggtaggaaacgaaaaaggctttttattgagtgacagaagcaagtaagaaaaagaaagaaaatggcctcttatttattttcgagacagaactttgctctgtttcccagattggagtacagtggtgcaatctttgttcactgcaacctccgcgtcccaggttcaagtgattctcgtgcttcagcctcttgagtagctggtattataagcgagcaccaccacgcctggctaacttttgtatttagtagagacaggatttcgccatgttggccaggttggtcttgaactcctgagctcaagcagcttcccaaaatgctgggattacaggtgtgagccactgtgcctggcccggccttttaaaaatcattatctacttgggagttagcagagaggaggcagggaagaagcattatatttttgaaatgtaagttatttcctttggtagtagaatatctgtgagaaaagagctagggagcagatgcaggtgggttttttttgtttgtttgtttgtttgtttttcctccccagtgggctggggctagcttgtgacatatttatactaaattttttgataaattattttagtcaactttactgtgtcactcagtagtgaaaattatgacatagcgtgaccattcttttgttatcttttatgcatgatgaaagtatcattaaaatgaaatattctgcttcttgccacttggactaattatttctgttaatgagaataatgtggtttttttgtttgtttgtttctttgtttttggagacagagtctcactctgtcacccaggctgaagtgcagtggcacactcttggctcactgcaacttccgcctcccaggtttgagccattcttgtgccttagcctcccaagtagctgggattataggtgcccgccaccacacctggctaatttttgtatttttagtagagacaggttttgccatattggccaggctggtcttgaactcctgatgtcaggtgatcaactcgcctcagcctcccaaagtgctgggattacaggcgtgagccactgcgcccactgagaaccataaagtttttaataattttcttttttatgtttgtcagtgcttaagtctaaagtttctactctagttatatttcaaccatcagtattgtggctttttttcttttgcttgatgttttatgttaaatttggctgagaaaaataccagcttattttaatactcttttttcctccagttttttttattgtgttaaaatatatataatataaaaattactatcttaaacacttttaagtgtacagttaatggttttaaatacatttataatggtgtgcaaacatctcataattattttcatcttgcaaatctgatactcttttacctgttaaacagtaattccccatttgtccttctcccatcactgtcaccaccattctactgtttgtctctatgatttaatattctcttatattcaattctagaaggagaaataataattcttagtttggtgttttatactcccctgggtctaaatacttttatttattattattattctttgatacgggggtctctctatgttgttcatgctagagtgctgttgcacagtcatcttttactgcagctatgacctcccaggctcgagccattctcctgactcagtctcccgagtagctgggactacagatatgtatgactacagtggctaatttttatttattattattattatttttttaaacagagtcttgctctgtcacccaggccggagtacaatggtacaatcttggctcactgcaacctctgcctcctgggttcaggcgattctcatgccttagcctcccaaatagttgggattacaagtgtatgccaccacacctggctaatttttgtatttttagtagagacagggtttcaccatgttggccaggctggtctcaaactcctgtcctcaagtgatccatctgccttggtttcccaaagtgctgggattacaggcatgagccactgtgcccagccccaatttttatttttatttttttgtagaacgacaaggtcttgccatgttgcccaggctggtcttgaactcctggacttaatcttctcatgtcggtttcccaaagtgatgggattacaggcatgagataccatgctggcaatacttgtagactatttttaaaaatcataattaggataatttagagttcatatgcagggtctgccacttaacacttgagttctcaaagacttggtgtcttcatctctaaagctagtacaataacttacaccctatagaactgttgtaaacattagaaataagtataaaatacttaatatgacatacaattgatgctttagaaacaattagtatgtgttgttaggatgaaagaggttaacggcttcctttcagatatttcagctggttgctgatagggatgtgtcggttattttgttaagtctttaggtaygtagagttaccaatctttttagaggtgtttattggggctttcagattctggaaaattgatttactctggtcacagtcatgagcattagtggatatgtgtttctgtgcttaaaaaaaaaaaaatacacactaccagattgtccgtttgatcctttctttaagaggaggctactcctctagttaccctaattttttttttttctttttgagatggagtctcactctgtcgccccagctggaatgcagtggcatgatctcggctcaccgcaacctctgcctcctgggttcaagcaattctcctgcttcagcctcccaagtagctgagattacaggcttgcgccaccacgccctgctaatttttgtatttttagtagagacagggtttcactatgttggccaggctrgtctcgacctcctaacctaaggtgaccccccgccatycccccgaccttggcctctcaaaatgctaggattacaggcgtgagccactgtgcccggcctcgttaccgtaattatttattttttaatttatttatttttatttatttattttgagacagagtctcgctctgttgtgcaggctggagtgcagtggtgcgatgtcagctcactacaacctccgcctcccgggttcacgccattctcctgcctcagcctcccgagtagctgggactacaggtgtccgccaccaggcctggctaattttttatatttttagtatagacggggtttcaccatgttagccaggatggtctcgatctcctgaccttgtgatctgcccacctcagcctcccaaagcactgggattgcaggcgtgagccaccgtgcctggcctatttatttaaatttttttttttttttttttttttttttttagagaaggggtgggtctccctgtgtttcccaggctgggctaaaggcatcctcctgcctcagcctcgcaaagtgctgggattaaaggtgtgagccactccacgcagccttttattcatttattttattttttaaaatttgagacaggatcgtgctctgtcatccaggctggagtgcagtggcacggtttcggcacactgcaactttcacctcctgggcacaaatgatcctcctacctcagcctactgagtagctgggaccatatgcatgcagcatgtccagctagtgtgtgtgtgtgtgtgcgtgtgtgtgtgtgtgtttttagtagagacagggtctggttgtgttacccaggttggtcttgaactccagagctcatgtaatccacctgcctcagcctctcaaagtcctgggagtacagccatgagccaccatccccagcaatgatctgaatgtttacttgctctgcagaacatccccttcacaaatattaaactatttgtgaacactatgtggtagttagaatcttgactaatacctattgtatggaggtaaggaagaaaataagagtctgaaaaattagctgtatttcagagtctcaatgttttcatgctgtgaggtatccagaaaagataatgtaatacccatggtgtcatcagtataatagctctggattacatgatgaagcctaggagatggcttggttataatccaggttatatttaacatttatagtcgattcttgattagccaggtggctagtgataactagaatttcaaatttcaagttccctagggaggtagatcaaacctgctgattcctcttatcctgttttttctatattcatcatctttaacctttttttctttttcttttttttttcttggtttttctttttctttttttcttttcttttttctttttgagaaagagtcttgctctgtcacccaggctggagtacagtggcgtgatctcagctcactggagcctccacttactgggtacaaatgattctcgtgtcttagcctccctactttcttttttatgcaactgaacatgtgtttggccttcatattccttaattaattaattaattaattaattttttgagatggagtcttgctctgtcccccatgctggagtgcaatggcgtgatctccaactcccgggtgctagtgattctcctgcctcagcctccacagtagctgggagtataggtgtctgccaccacacctggctaatttttttatttttagtagagatggggtttggcgatgttggccagggttgtcttgaactcctgacctgaggtgattcgtcctcctcagcctctgaaagtgctgggattacaggcgtgagccacacacccggccaagtattctttaatttagaaatgtaatgttaccagttttagtctatattctgctttgtgcttataaatgcagggagggtggagtgtttgtgagatcagtccttactctaatgacataatcttattagcagaagtatttttgaggaagctccattagggtgattcagatgctgcttgagctcaggtgctaactacctggctggttccataaaagcaggaggcctgacaggtttgtaaaagcttctgatttcaggccgggtgcggtggctcatagctgtaatcccagcactttgggaggctgaggtgagcggatcacttcaggtcaggagtttgagaccagcctggccaatatggtgaaacccctattctactgaaaatacaaaaaattagctgggtgtggtggcgggtgcctgtaatcccagctactcgggaggctgaggaaggagaatcacttgaacccgggaggcagaggttgtggtgagcgaagattgtgccactgcactccagcctgggcgacagagcaagactctgtctcaaaaaaaaaaaaaaaaggaataaaaaaaaaagcttctgatttcatctcccttttcccccacccatttctttgataagtgataattctttttctcctttaaatttaaggttcctcagaaaattttgagtaaatgggaagccagtgttggacttgcagaacagtatgatgttcccaaggggtsaaagaaccgaaaatgtattcctggttcaatcaagttggacagtgaagaagatatgccatttgaagactgcacaaatgatcctgagtcagaacatgacctgttgcttaatggctgtttgaaatcactggcttttgattctgaacattctgcagatgagaaggaaaagccttgygctaaatctygagccagaaagagctctgataatccaaaaaggactagtgtgaaaaagggccacatacaatttgaagcacataaagatgaacggaggggaaagattccagagaaccttggcctaaactttatctctggggatatatctgatacgcaggcctctaatgaactttccaggatagcaaatagcctcacagggtccaacactgccccaggaagttttctgttttcttcctgtggaaaaaacactgcaaagaaagaatttgaracttcaaatggtgactctttattgggcttgcctgagggtgctttgatctcaaagtgttctykagagaagaataaaccccaacgaagcctgktgtgtggttcaaaagtgaagctctgctatattggagcaggtgatgaggaaaagcgaagtgattccattagtatctgtaccacttctgatgatggaagcagtgacctggatcccatagaacacagctcagagtctgataacagtgtccttgaaattccagatgctttcgatagaacagagaacatgttatctatgcagaaaaatgaaaagataaagtattctaggtttgctrccacaaacactagggtaaaagcaaaacagaagcctctcattagtaactcacatacagaccacttaatgggttgtactaagagtgcagagcctggaacygagacgyctcaggttaatctctctgatctgaaggcatctactcttgttcacaaaccccagtcagattttacaaatgatgctctctctccaaaattcaacctgtcatcaagcatatccagtgagaactcgttaataaagggtggggcagcaaatyaagctctattacattcgaaaagcaaacagcccaagttccgaagtataaagtgcaaacacaaagaaaatccagttatggcagaacccccagttataaatgaggartgcagtttgaaatgctgctcttctgataccaaaggctctcctttggccagcatttctaaaagtgggaaagtggatggtctaaaactactgaacaatatgcatgagaaaaccagggattcaagtgacatagaaacagcagtggtgaaacatgttttatccgagttgaaggaactctcttacagatccttaggtgaggatgtcagtgactctggaacatcaaagccatcaaaaccattacttttctcttctgcttctagtcagaatcacatacctattgaaccagactacaaattcagtacattgctaatgatgttgaaagatatgcatgatagtaagacgaaggagcagcggttgatgactgctcaaaacctggtctcttaccggagtcctggtcgtggggactgttctactaatagtcctgtaggagtctctaaggttttggtttcaggaggctccacacacaattcagagaaaaagggagatggcactcagaactccgccaatcctagccctagtgggggtgactctgcattatctggcgagttgtctgcttccctacctggcttactgtccgacaagagagacctccctgcttctggtaaaagtcgttcagactgtgttactaggcgcaactgtggacgatcaaagccttcatccaaattgcgagatgctttttcascccaaatggtaaagaacacagtgaaccgtaaagccttaaagaccgagcgcaaaagaaaactgaatcagcttccaagtgtgactcttgatgctgtactgcagggagaccgagaacgtggaggttcattgagaggtggggcagaagatcctagtaaagaggatccccttcagataatgggccacttaacaagtgaagatggtgaccatttttctgatgtgcatttcgatagcaaggttaagcaatctgatcctggtaaaatttctgaaaaaggactctcttttgaaaacggaaaaggcccagagctggactctgtaatgaacagtgagaatgatgaactcaatggtgtaaatcaagtggtgcctaaaaagcggtggcagcgtttaaaccaaaggcgcactaaacctcgtaagcgcatgaacagatttaaagagaaagaaaactctgagtgtgcctttagggtcttacttcctagtgaccctgtgcaggaggggcgggatgagtttccagagcatagaactccttcagcaagcatacttgaggaaccactgacagagcaaaatcatgctgactgcttagattcagctgggccacggttaaaygtttgtgataaatccagtgccagcattggtgacatggaaaaggagccaggaattcccagtttgacaccacaggctgagctccctgaaccaggtaaggacatctaaatgtgataaaaaaaaaaaaattggagaaagtgctgataaacattgtccttctgaaattggtctgttgtaatggtaaagtgaagtataaactaggggggaagaatcatcacttcaatgaagaaggagttttatgtagaaaggtctgaattttgaagatgagatttccatatatattcaaaagttaaactttaccagaagcccttttccccaaccttttcaagtaaatctctataacatctttctttctcactttctctctctctctttctctctctctctttttttttttttttctaattttttttttcttttgagacagggtctcactgtgttgcccaggctggtctcaaactcctgagttcacgccatctgccagcctttgcctcctaaagtgctgggattactcttgcctgacctgttccccgtttcttaccttttaaaatccccaagctttttgggactcaatatgtaactgcaagtaattgagaggctccgatcctaggatttaaatccagttgttaggttatagaaagcaaatagattctattggatggtagtttcttttttttttcttaaggcacccgccaccatacctggtaatttttgtatttttagtagagatgagggttcaccacgttggccaggctggtcttgaactgaactcaagtgatccgcccaccaaaagtgctgggatacaggcgtgagccactgcatctggctggatgttaggttttctttgaccattacttaagataggtccttctgttttgtggacaatttgatgaaccacatgcgcttttgaaaaaactgcaagtattctgtagtacttatttgaaggtcttaggtgtcttaaattcctactggaatgaggattatgaacaaataaaaataccagaagtacccaagtgttgtacctagcagcagatggaaaacagaaatctttcaagatactaacattacacagtatacagttgaggataaagcagtgtgtgtatacatgtatatacatatttttttcttttttacagcaatatccattaacataagattctcaaaactgtgtatcatagtagatttttctctaacagctttattgaaaatgcagttatcatatcataaaattcagctttyaacgtttttaattgagtggtttgtagtatagtcacagagttgtgcaacaatcagtgcgatcaattgtggaatatttgcatcatcccagacagaaacacagaactcttgtcaatctgccttcaggtttttttttctttttttttcttgagacggagtctcgctctgttacccaggctggagtgccgtggcgtgatctcggctcmctgcaggctccgcctcccgggttcacgccattctcctgcctcagcctcctgagtagctgggactacaggcgcccgccaccacacccagctaatttttttttgtatttttagtagagacggggtttcactgtgttagccrggatggtctctgatctcctgaccttgtgatccgcccgcctccacctcccaaagtgctgggattacaggcgtgagccactgtgcccagccctgccttcagtttttaccaatctgtagatttgtctattgtgtacatttcatagaaatggaatcatacaatatgtggtccttttgggtctggtttcccttacttagtttaatgttttctggttcatgcctcttgtagtatgtatcagttcttctgtcttcttctaaaattatggttaaaaagcatgtaacctaaatgtaccttttttggttttttttttgagatagggtctggctctgttgcccaggctagagtgagatttactctttaacggtatttacggccaggtgcggtggctcacgcctgtaattccagcactctgggaggccaaggctgatggatcacctgaggtcaggagttcaagaccagcctggccaacatggcaaaaccccatctctactaaaaatacaaaaattagctgggcatggtggcgcgctcctgtaataccagccactcgggaggctgaggtaggagaatcacttgaacccgggaggtggaggttgcagtgagtggaggttgcagtgagctgagattgcgccactgcactccagcctgggagacagagcgaaaccccatttcaaaataaacaaacaaaaaaacagtatttaagtgtgtattatagtgtcatgaatcatgtacatgtacaacagcagatctccaggacgttttcgttttgcttgactgagactctatacccattgaacaacaactcctgattttctcctttgttcaatccatgacaactaacattctttctgcttctgtgaatttgattactttagacatctcatgtaagtggaatcatgcagtatttgttgttttgtgattgggttatttcacatttcacttagcataatgttttcaaggttcatccatgttgtagcatatgacaggatcaccttttttttttttttttgagacagagtcttactgtgtcacccaggctggagtgcagtggcgtgatctcagctcactgcatcctctgcctcgtgggttctcggctcactgcagcctctgcctcgtgggttcaagcaattctcctgcctcagcctcctaagtagcttggactacaggcacatgccaccatgcctggctaatttgttttgtatttttagtagagacagggtgtcaccatgttccccagaatggtctcgatctcctgacctcgtgatccacccgccttggcctcccaaagtgctgggattaaaagcatgagccaccacgccctgccgataacctttttttatggctgaataatattccaacatactttttcttttccatactaaagcatcttttctttatcagttcattggttgatggacatttagattgcttccacatcttgactattgtgagtaatgctacagtgaacatggatatgcagatatctctgagatctggttttcaattttttttttttttttgagatggagtttcgctcttgttgcccaggccggagtgcaatggcacaatctcagttcactgtaacctctgcctcctgggctcaagcaattctgcctcagcctttcaagtagctgggattacaggcatataccaccacgcctagctaactttgtatttttagtagagatggggtttcaccatgttggccaggctggtgtcgaactcctgacctcaggtggtctgcctgcttcggcctcccaaagtgctgggattacaggcatgagcaactgcacccagtgatgttcatttcttttggataaatacctagaatggcattggtggaacatagggtaattctacttttatttttatttttttttgagacaarggtctccctctgtcacccaggctggagtataatgatgcgatctcaagtcactgcaacctctgcctcctgggctcaagcaattcttgtgccccagcctcccaagtagctgggattacagtggttttgccatgttagccaggctggtctcaaattcctgaccttaagtgatcctcctgcttcggcctcccaaagtgttgggattataggtgtgagccaccgcacccggcctacttttaatttgatgaacctctatagtgttttgcataattgctgcatcattttataagtcctttgtccatatacatatgtttttaatgatactgggcctctttgtcacctagggtggaatacagtggtgcagttatagctcactgcagcctcaaactcctgggctcaagtgatcctcctatctcagcatcctgagtagctgggagtacaggtgcatgccaccacacttggctaatttttgtgtttttttgtagagacaggtttctggctatgctgcccaggctggtcttcaactactgggctcaaatgatgttcccactttggcctcccaaaatgctgggattccagacatgagctactgtgcatatccctttgcatatttttaaatcttgttatttttaaaaaatgaggtataagagttattcatatatcctggatattaaccaattatctgatgtatgatttgcaagtattttctcccattttgtacctgccttttcactctgttgactgttttctttgctgtgtagaagttaatgtgattttttttttccatttttgctttttaaaaaatttttacttgtgctttgggtctcatagccaggaaattcttgttccttccaatatcatgaagttttttcgtctgttttcttctaggagtttcatagttggaggtcttatgtttaggtctttgatctattttatgataatttttatgtaaggtgtaaaatgagagttcatcttcgttcttcagcatgtgcatatccagttttcacaataccatctgttaaagagactatcttttccccattgtgtagtcttggcactgttgtcgaaggtcatttgaccatgtatgtgatttatttcagggatctctgtttttttttttttttttttaatttttagtaaaattgagacggggtccaaccatgttgcccaggctgttcttgaattcctgggctcaagtgatcctcctgcctcagactcccaaaaagcggggattacaggtgtgagccaccaccctggccagggatctctgtggatctctattctgttccattgacttacatgtctatatttttatgccagtacaatattgttttgattaccatagcctcatgatatgttttgaaatcaagaaatgtaaggccttcagttttgtttttttttcttctcaagattgttttgtttatttgggggttctttgaaattacacactaatttaggatagtttttttatttctgcaaaaaaaaatggcttttgagatgttgatagggatggcattgactttagtttcctttgggtagtagggatatcttaacaatattaagttttccaatccatgaaaacaggctatctttccatttatttatatcttccgtaatttcatccaacagtgttttggagtgtacaaccatttctcctccttggttaagtttattcttaagtattctattcttttttatgctattgcaaatgtgattgttttaatttccttttatattgttcattatgagtatatagaaatgttcaggtttaattttgtatcttggaactttgccgaatttgcttctttgttctaatagcgtgtggaatctttagggtttcctacataaaggttcatgtcatctgcaaagagataatttggctccttgcttccctatttattgcctaattactctgctaggacttcaaataatgtgttgaataggttgctacagtggtatatttcccttgctctttatcttagaggaaaagctttcagtgtttcactgtcaagcatattagctgtggtctttttatatatagtctttattatatttatgtaattacttttttgtttgtgtttttgtttttggacagcgtcacattcttttttttttttttttttgagacagagtttcattcttggtgtccatgatggagtgcagtggcgcgatctcggctcactgcaacctccacctccctcgttcaagccattctcctgcctcaggctcctgagtagatgggattacaggcgcctgacaccacgcccggctaatttttttgtatttttagtggagacggggtttcaccatgttggtcaggctagtctcgaactcttgaccttgtgatctgcccacctcggcctcccaaagtgtagacagggtcacattctgtcacttaggttggagtgcagtggtgatatggctcactgcagcctcaaccacccaggctcaagcaatactcccaccttgacctcccaagtagctgtgactacagccatgcaccaccatactccgctgatttttaacctttttgtacaggtcaggttttactatgttgcctaggtgggtctaaaacttctgagctcaagtgatcctcccacctcagcatcccaagtagctgggactgcaggtgtgcaccatgacacctgactaattttgtaattttttgttgaaacaagattttactatgttgcctagggtggtctcagactcctgggctcaagcagtcttcccaccttggccccccaaaagtgctgggattacaggtgtgagccaccatacctggcatgtaatttctttttattcctagtttgttgagtgctttcttttcagtcatgaaaggtagttgaattttgtcagatgttttttctacatcaagtgtgaaggtcatgtagtttttttggggtcctttattctgttaatgtgctgtattctgttgattttttttttctatttttgaaccatcgttgcattccaagattaaattccacttggtcatgatgtatatttcttttttttttttttgagacggagtctcgctctgttgcccaggctggcgtgccgtggcgcaatctcgggtcactgcaagctccacctcccggattgacgccattctcctgcctcggcttcctgagtagctgggactacaggcgccccccaccacgcccggctaaattttttttgtattttttagtagacagggtttcaccatgttagccaggatggtctccatctcctgaccttgtgatccgccctcctcggcctctcaaagtgctgggattacatgcatgagccaccgcgcccggcccccccttttttttttctccagctggccctaacgggagccgtatgtttcttttaatgtgctatttaatttgatatactagtattttgttgaggatttttgcatcagtatttataaaagatgttgctctgtagtttatcttttcatttctatatgctctagtctttgtttctttccttctaccaactttgggcttagatttatttttctgtcttctcgaggtgtaaatttaggttgttgagttgaaaactttgtttttcaatgttggcatttactgatacagacttctctcttagtagtgtttttgctgcatcccataagttttgtgtttttttttttgagagggagtctcgctctgtcgccaggctggagtgagctggcacgatctcagctcactgcaagctccacctcccgggttcaagcgattgtcctgcctcagcctcccaagtagctgggattacaggtgcctgccaccacgcccggctaattttttgtatttttagtagagacggggtttcactgtgttagccaggatggtctcgatttcctgaccttgttatcctcctgtctccgcctcccaaagtgctgggattacaggcgtgagccaccgcgcccggccctgtcaaaagatattttcaaatttcccttgtgatttcttctttcttccattgattgttcaagagtttgttgtttaatttccacctattggtggatttttcagtttttgtactgatactgatttctagtttcacttgattgtgactggaacagatacttggtatgatttcagtcttcataaatttgttaagacttgtgtggctgggcatggcagcttacgcctgtaatctcagcactttgggaggccaaggcgagatcacctgaggtcaggagttcaagaccagcatggccaacatggcaaaaccccatctccactaaaaatacaaaaactagctgggcatggttgctcatgcctgtagtcccagctactcaggaggctgaggcacgagaactgcttgaacccaggaggtagatgttgcagcgagctgagatcacgccactgcactccagcctgggcgacagagtaagatcctgtgtcaaaaaaaaaagactctgtgtgaccatattggagaatattctatgtgcttttgacaagaatgtgtattctgctgctgtttggtattggtgttttatatatgtttgttatatgcaattgttcaagtcctctgtttctttattgatcttcattgtggttctctccattattttaacgtggagtattaaaatctccttgtgttactctatttctcctttcaattctgtcattatttgctttttatatttgggtggtctgatgttaggtgaattacgtatttgcaagtgttatagcttcctgatgaattgactgttttattatcatatcatgtgttcctttgtctcttgtgacagtgttttacctaaagtgtattttgttttatataagtatggccaaaacctctgctttcttttgtttaccactggcatagaatatctttttgcagccattcacgttcagcctctgtgaagtgagatttaaggctcacttaaatcttaggtgagccttttatagatagtacctaattgtataatggttttcattcactcaaccactctatctttagattggggagtttaatccattttttttcttatagtaattgcttttttttttttttttttttttttgaaacagaggcttgctctgtcgcctaggctggagtgcagtggcatgatcttagctcactgcaaactccgcctcccgggttcaagtaattctagtgtctcagttttcctgagtagctgggattacaagcgtgcaccaacacgcttggctaatttttgtctttttagtagagacagggttttgcagtgttggccacgccagtctcaagtgatcttcctcaagtgatccacctgccttagcttctcaaagtgctgggattatggttatgagccactgtggtcggcctctttttttatggagacaggctctccctctgtcatccaggctgtagtgcagtggggcaatctcagctcactgcaacctccacctctgggttcaagcgattcttgtgcctcagcctcctgagtagctggggctacaggtgccttccaccacccccggttaattttgtgtggtttttcatttttaatagatacggggtttcaccatgttggccaggctggtcttgaactcctagcctgaaatgatccacccactttggcctcccacagtgcagggattacaggtgtgagccactgtggcctgtatttggcctcattttttgttaaagtaattacagacaaagatttgttattaccattttgctaattgtttctcgtctggtttgtagctgttttgtcccccttttgctgtctttctgccttccttgttttttgtttttttttttaattgacatactttgttttctttatcatttcattttatgtatcttcaataggcattttccatgttgttaccatggggcttaaataaaacatcttacaggtacagtaatctattttaagctgttaacaacttaagttgaatgtatataaaactctttttttccccccaattttttttcaaggcggagtcttgctctgttgcccaggctggagtgcagtggtacaatctcagctcactgcaaactcccgggttcaagcaattctcctgcttcagcctcccaagtagctgggattagattacaggcatgcgccaccatgcctggctaatttttgcatttttagtagagatggggtttcaccttgtcggccaggctggactcgaactcctgaccttatgatccgtccatgttagcttcccaaagtgctgggattacaagcattagccactgcgcctgccctgtaaaactcatatttccccttccccactttgttgttgtttttgttttttctttttttgagacagagtttcattctcatcgcccaggctggagtgcagtggtgtgatctcagctcacagcaacctttgcctcctgggtttgagtgtttcttctgcctcagcctcctaagtagctgggactacagggttgtgccactatgccgagctgagttttttgtatttttgtggagacagggtttcaccattttggccaggctagtctcgaactcctgatctcaggtgatctgcccaccttggcctcccaaaatgctgggattacaggcgtgagccatcgcacccggcccccactttgttttattttttattattattactttttgagatgttgtctcactctgtcacccaggctggagtgcagtggcacgatcttggctcatttcaagtttcacctcccaggtacaagcgattctcatgtctcagcctcccaagtagcttggactacaggcgcgcaccaccacgcccagctaatttttgtgttcttagtagaggcagagtttcaccatgttgaccagtttttatttcttttggttatatccctaggagtagaattcctgggtcatttggttattctatattcaaccctttgagtaactgccaggatgttttgcaaggctgctttaccataatatatccctcctagcaatgtatgagggttccacttcctccatatgcttgctgacactttatttggttatagccgtccttttgggtgtggagcagtggtatctcattatgattttcatttgcattcctctgctggctaatgatgttcaatatattttcatatacttttgggtcatttatgtattttatttggacaattacatatctagagtctttgactatattttaattggggcttttttgccttttggttattaagtaataagaggtctttatatattttacatataagtccattattatatatgatgcaagtattttctcctattctttgggtttatttgatacacacatattttctcctcttatttgggttgtctttttattagtttgatcatataccttgaattacaagaatttaaatcctgatacattctgtttgtttgctattgttggtgtatgttagaaccattgtgtaattcttggttatgaggatttaccctatgttttcttctaaaacctttgatgcattttgaattattttttgtatatggtgtgagtgaggggtccaattttattttgctgcatgtgggtgtccacttgttgaaaagaatattctttttctttttcttttttttttttttcagacagagtctcgctctgtcacccaggctgcaatgcaacccagagccggatcttggctcactgcaacgtctgcctcctgggttcaaggagttctcatgtctcagcctcccaagtagctgggattacaggcatgcgccagcacgtctggctaattttaatttttttaagagagccagtctaggcacggtggctaggccgggcacggtggctcacagctttaatcccagcacttttgggaggctgatgcgggcagatcacttgaggtcagaagttcgagaccagcctggccaacgtggtgaaaccccatctctactaaaaatacaaaaattagccggatgtggtagcagatgcctgtaatcccagctacttgggaggctgaggcaggagaatcgcttgaacccaggaagcggaagttgcagtgagctgatattgtgccatagcactctaccctgggcgacagagcaagattctgtctccaaaaaacaaaacaagagacagccaccacgcccagcctgaaaagaatattctttacctatttaatggtctttgcatccttattgatagtcagttggtcataactacgtaagaggttggttctgtgctctcaatgaggtggtggctcacacctgtaattccagaattttgggaggccaaggtgggtggatcacctgagatcaggagttctagaccatcgtgtccaacatgagggtcaaacctcatctctactaaaaatacaaaaagtagtcaggtgtagtgacacatgcctgtaatcccagctactcaagaggctgaggcaggagaatcgcctgaacctgggaggtggaggttacaatgagctgagatcatgccactgcactccagcctgcctgggtgkcagagcaagactcttgtctcaacaaaaaataaataaaaattgtaagtgttagttacagtatttttgtagtaattaattacagtatttttgtagtaattaattttactgtgtttctgaaattggaaagtataagttttttaactttaccctttttcaagatcattttggctcttttgcatctttggtgtttcatattaatgttagaacaaggttgtaagtttctgcaaaaaagccagttatgattttgatagggattgtgctgaatctgtagggtagtttgcatagtgttgccatcttagcaatattaagtcttccaatccatgaataatagatgacttttcatccaattagattcgtctttcacttctttccatgatactttgtaattttcagtgtataaattctgcacttaaaaaaatttattcctaagtattttagtctttctttgtccttttataaatgaatttgtttttgatttcattctcaaattatctcatgtttatgaaaattttgtatattattttaatatttaatattaatacaaacattttgtatattattttatcgtgcaactttgctgaactcatctctgttaattaatagaattgattactgtttgttagtaatagtatttttttatgaattattttggattttctgtgtacatgaccatgcaatctgcatgttttctaatctagttgcccttttccccctttgcttacttaccctggctagagcctccagtgtgatgcggaatactagtggaaaaagcagacatccttgtcttgtttttgatgttaggaggaaataattgagtctttttcattaactatgatgtcagctgtggttttgttatattacctttcatatttagaatgttctcttttatacctattttgtcacatttgtaagatcttttttgtgtctattgagaagacaattttgcgtttccccctttattctatccatatgatgtattatattgattgatttttgtaatttgaaccaactttgaagtcctggggtaaatcctacttggtcatgttgtgtaatgttgttggatgtgttttgcttgtattttgctgaagatttaaaaatctatactcaaaggatattggtctacagttttcctatttgtgtgataccttttgtctagttctttttgttgttgatgttttttgtttttatatttttgagacggagtttcgccctcatcgcccaggcttcagtggtgtgatctcggctcactgcatcctctgcctcccgggttcaagtgattctcctgcctcagcctcccaagtagctggggttacaggcacgtgccaccacacccagctaatttttgtatttttagtagagacggggtttcaccatattggccaggctggtcttgaactcctgatctcaagtaatctgcctgtctgagcctcccaaagtgctgggattacaggtgtgagccgccgtgcccagccgtcttagtctagttctgctttcagagtatactggcctcatagaatgaacgtgacaggtagtttcttaagtagtgctttgttataacccaattgtggcctttcttatttattttctcccctttttcctgacatcctttactttcaccgcctttatatagatctacctttgctagtaaatagggtcatatgggtgctggaaataatccattcctgtgaattattattaatgtacatgtgaatattactgttaaagcagatgatgtcttttccttaagaatagttcacaattttcgttcattatatttcaaatattttcatataattttatttttacttcagttttgaattttttggttttgagtatgtattgaaaagatgagagaagctattcagtaaaaattttcctcccaaccctgtacctcagtggcttagatctgctctccagagatactcagtgtatgaattaccaagaaaaaggtagatgtgtgtttgttacacaaattcaacagtatatatacgttgtttgtaccttgatttttttgtttcactctcatatccatgcataatgagtttctcattttttaagcagcagagtgtgccatagtttttygtttttgtttttgagacagggtctcactttgttgcttaggctggagtgtggtggcacaatcttggctcactgcaacctttgcctccggggctcaagcaatcctcccacatcagcttcccaggtagctgggactacaggcacgtgccaccacacccggttaatttttgtatttttggtagaggtgaggtttcaggttggtcttgaactcctgagctcaagtgttccacctgctttagcctcccaaagtgctgggattacatgcgtgagccaccgggcccggccagtagtgtgccataatttgttaaacctgttctcaattaatggacatttagtttgttttccagttttaagtaatttaaaatttagcatagttaaaaatcttaagtcatttggtatgtgtgagagaacctgaaagataaattgctatcgaggtttatttatttatttttgaaatggggttcttgctrttttgcccaagcctggtctcaaactctttccttcacttgagagatcctcctgcctcagccaaatagctgggaccacagccgtgtactaccatgcccagcttaggtcatttggtttgtctttggcgatatctcatagtattccaatttgaaatttcacttcatagttgttatactgatatgttcctactaacagtacagaaaagtacagattggcattctgttaattttttttaacatccagtctaaccacccccttttccaagtctgtattcccactcacaatctagtaattaaaaaaaaattttgagtaaagtatgaaattttgttaaggggctgcatgtatagttttgatatgaatgaagctatgtttcagatggttaatttactttggttgtttggaatttccaatggttttttattttacagagtcctgccaaatttataacaactgtagggcagggtgtggatagggatatttttactgagtaaatactattacatgtactagaggtattctgttatgttaaaatatccygttagagatacatgatgaaacacatatggatgaaatattatggagtatgagatattgcaaaataacatggaaagatggggatacagataaaaatagattggccatgaatttgtaatcagtgagtctaggtgtttactatactggttttgtagatgtttgcaattttctgtgatacatcctttttcagtaggaattcagaataaagaaagtgctaaatatttgagtaaatcagttgactatgaaaataataatgccttatggtcttaaatacatatggcattaaaatataccacaacaataaaatataagttgataaggaggcagatggaagttagtttcctttactttctggcaggatgataacaatattcattaactttggatttttatgagttaaatattattattattatttttagacagagcctagcacccaggctggagtgcagtgatgcgatcttggcttactgcaacctccgcctcccgggttcaagcaattctcctgcctcagcctccggagtagctataggtgtgcgccaccacatcgggctaatgtttgtatttttagtagggacagggtttcgcctgttggccaggctggtctcaaactcctgacctcaggtgatcccgctcgccttggcctcccaaagtgctggcattacagatgtgagccatacacccggcctaaatattcatatttaaatttttaaaataacctaaaacatggaacagaaagcagaaagtttggcctagcacagtggctcacacctgtaattccagctattcgggacagttaggcaggagaattgcttgaacccgggaggcggaggttgcagtgagccgagattgtgccattgtactctaccctggaccacaagagagaaactctctcaaaaaaaaaaaaaagcagaatttttttttgtaatttatttttttttggaagattcatcctgtagattttctcaggctgcattgcgctgtatgcagctctgttatatggttttacatatttctcttactctgtacagtagtctccctttatctagaaactcatttttcacagtgtcaattacctgtagtcaactgaggtccaaaaataggtgagtatagtgcaatgcagttattttggggcagagagggagagagagcacattcacgtaagttttattatagtatattgakaacattggcctttttttctttttcttttcttttttttttttttgagttagagtcttactctgtcacccaggatggagggcagtggcatgatcttgacttatgagctaytagctgcaactacagacatgcaccaccacgctaagcagatttttgtatttttagtagggacgggattttgccatgttggctaggctggtcttgaactcctgacctcaagtgatccacctgcctcgacctcccaaagtgctgggattacaggcgcgagtcaccagccccggcctaggctgaatgatctagattgccactattaggaatggttttggggtttttgcctttttttttgtttctttaaacttttttctctgaggctccagaactaggaaagtcgaggtataaatagggtctaataatctgtattggaagagtgatgttgctactagtattctagtcctttggaaaaattcaccattttaatgaaaaggagaaaactgtatgtagttcagtcttgatgaaagagattttactttttaaaattaactttatccaaggtataatttacatactgtgaaattcgtacattttatgtatacaatcgaatactatttgcaaatttaatgtgttatgcaaccatctctgtaaatccatttcggagcatttctaccatcccagtaaagatccttctaatctgtatrtagttaatccctcttcctaccactagtcctagagaaccaatagttgactgtctctgtagatttgccttttccctggacatttaatattaatggaatcatgcaatatgtgatcttttgtgtcttgttcttctcatttggtatatttttctgatttaaaaaaaaaaacttaccatctgtaatttgtccccttttttgctaaatagtattccaccatagatgtatgcctaattttatttattcattcattcattgattaacatttgggctgtttcaactttttggctgttttatcattttagttggtagtgtatactctgaggtctacggctattgctatactcatccagtatttgtcatttatctctttcttcacaatacagtgacattttgtagttgtatagtaggcatgacgtactggttgtgtggtaggaattagggcatatttgctgagaaccttaggggtagtgtgatttggctcttgctttgtttgatatttgctacatatcctgtattaaggtttgcataattactcctctttccattgacttgtgcagttttatggattttgatattttcttccagtatccaaaaggtcatattcctcctttgttcctgatatattctttatcttagcttggcaaatcacttacttttttgcctcactttgctcctctgtagtaagagtaggtgaattctccatgcttttctaactgaaaagtgctgtaactgggagagaacataggtagggagttggggtagttgaggcaaggaagaaagaggggaagcctagcaacagccaggaagcatctttttatgtatttttttatttttttgaggtggagtcttgctctgtcacccaggctggagtgcagtggcacgatctaggctcactgcaacctccgcctcccaggttcaagtgattctcctgtctcaccctcctgagtagctgcaactacaggtatgcaccaccacacctggctagtttttgtatttttagtagagacggagcttcaccatgttggccaggctggtctcaaactcccgacttcaagtgatctgctggcttcagcctcccaaagtgctgagattataggcatgagccactgcatcccacccaggaaacatctttttaaaaatcattcagttgtcaccatgctgtttcacttacaatatgttactctatttgtgttttatttttattttttattttttagacgaagtctcactcggtcgccctggctggagtgcagtggtgctgtcttggctcactgcaacctctgcctcctgggttcaagtgattctcgtgcttcagcctcagtatgttactttattttttatttagggaaagagttggtagacktttctaccaaagtagaaaagtgccagatagtaaatattttaggttttatgagccataagttctctgtcacctaatagatgtatccagtacagaatttctcactttaatttccagtcttttgtgctatctgctggtttcattgtgagctgcaaggaaatagagagctggagtattgaagcctagtctgagaagttactctatgagagaagcaaaccccaaaggtagagtggaaacagcaattataagaggaaacgtggccaggcgtggtggctcaagcctataatcccagcactttggaaggctgaggtgagcagatcacctgaggacaggagtttgagaccagctgggccaacatgatgaaacactgtctctactaaaaatccgaaaaatgagccagatgtggtggcttgtgcctgtagtcccagctactcgggagactgaggcacaagaatcacttgaacccatgaggtgaaggttgctgtgagccgagatcacaccactgcacttcagcctgggcgacaaagcgagactccgactcaaaaaaaaaaaagaggaaatgcaacaagacttagcctatggaacctgccaagaagaagacaaaggaaggagactgtctaggattgagatccaatttgtgtgagggggttagtgatggatggggataaaggggcatgatgtgatagcatagggatctgttttaatgaaaaatgttcatggggagttttgagagactttgggatggaattatgaccttgccacctcaataattaactaattagatgggtttgtgtaagtcaccaccctgcccccactttgagacagggttttgttctgttgtccaggctggagtgcagttgcacaatcctagctcattgcagcctcaaactcctgggctcaagtgatcctcccgccttagcctcccaaatagctgggactacaggcgcgtgccaccacacctggctaatttttaactttttgtagggacgaggtctcgccatgttccccaggcttgtgttgaactcctgggctcaagtaatcctcttgcttgtgcctccaaaagtacttggattacaggcgtgggccactttgcctagctgttttcaccattactttgaagaaaaatgtatactttaatattttgatcataaaacatgacaaggttattattattttttgagatggaggctaaagttcagtggcacgatctcgactcactacaacctccaccttccaggttcaagcaattttccttcctcaccctcctgagtagctgggactacaggcatacgccactacacaattttttatttttagtagagacggggtttttccatgttcacaggctagtctcgaactcctggcctcaggtgatccgcccaccttggcctcccaaagtgctgggattacaagcatgagtcactgcgcccaaaccgtgacaagatttttttaaaggacgtacccaaaattccatttttaatctttcaattttttcttttcttttgatccataaagcaattgcatatatattaaatcttattctcctgccttttgcatacatgacatacacttttatgttattgggataatgacatataatcagttatatatattattattattttatttttacagatagggttttgctgtgtcattcaggcttgagtgtggtggcactgtcttggctcactgcagcccctatctcctgggctgaagccatcctcctgcttcagtctcacatgtagctgggaccgcaggtgtgtgccaccacaggcagctatatttttatgtttagtagaggcatggtctcactttgttgcccagcctgttcttgaactcctgggctcaaaccatctgctcaccttggcctcccatgccttttatgttttttgataattctgtttagatgtatagttctctgttttttagcatgagacagtaatacaaccatatgatactaaatcgatgaagtgtttgtaaagtggttttgaaattcatgtggtagtgccgattatataatattctgttgaaatgtcattcctgatattctacaaaatccatagagatgttgtttaaaatgcaggttgagcattcctaatcagaaatccaaaatgctccaaaatcgaaatctttttgaatattgacataataccacaagtggaaaattccacagttgacatcatgcaatgtgtcagtcagaacacaggaacacagcagagtttattcaacgtcccccagggaaaaactatccttccatcacccttcagcttagatgtatcttttacatgcacagccggattttcccatgcaattatacccataaaaggtgataaaatggcacacgtgcaggctggatgcaccaacagaaagttttccaaaataacccacatggggcaaaagcctccttgcattattcattgtgtttttaaattaaaaagaattttttcctgctttgtggtataaagattttgttgaacttctcagaaagcctgaagatatccccatagattagagtaataagaaaggaggaagaatttaggtatagtgcagaaagtaagtcaggctcttggagaaactagacagtggtgtaagtgtgaaacatctttcagaagagtatggtattagactgaccaccatgtatgatgagacaggccctacaggaattcaggatgactaggacagagtaactgtgctgggatgtgctaattaagcaggcatgtgtaagtgtaaacttgctatgataggcaaaagcttgtgttctcactgttagtgatttcaaggcatgaatttcttttcttttctttttttggagatagtctcgccctgttgtccaggcttgagtgcagtggcacaattatggctcacagtagccttgatcttccagactcaagcattcttccctggtagctgggactacagctgtgtgctactatgcttggctatttttttttatttttatttttagtagagatggggtctcactatgttaactgggctggtattgaattcctgggctcaagtgatcttcctgcattggcttccctaagtgctaggattacaggcgtgagctgctgcacccagccccaaggcataaatttttttttttaaagtttggctctgtcacccagcctggagtgcagtggctagatcttggctcactgcaacctctgcctcctgggtttaagtgattctcatgcttcggcatctggtgtagctcgcattatagacatgagccaccatgcctggctagtatttttttttttttttttttttaagtagagacaggctttcaccatattggccaggctggtctcgaactcctgagccaccgcacctgccccaaaggcatgaatttcttaccagttcgttattatgctaacagaaaggcatggatatctagggacatcttttctgattggtttcacaaacattttatagcagtagttggtgcttatttcagggaagctggacaggatgatgactgttcctccttgaaaactcttcggctcatcctgcagctgcaattttatcaaaaataatgtttatgccatgtgctttccctgaagtgtgacttcactgccatatgaccagggaatccctagattgatgaagagtaaatataaaaatgctttcttgaatatgctggcagctgtgaatagatgtatgggtgtgaaagggtttcaaaaggagtgaaggatgccatatatgctgttgtcagtgtctggaacacagtgactaaaggtacagctgtgcatgcctggcaccacttgtgaccttcagctgtgttcactgatgataatgaacaaggtggtgattttgatggcttcttcagtaaagtgagaaaaatgtgtaacatccttacatatgcaaaaagtataccttccatttgtcagtaagctggaagaagtggataacaagaaagcttttaatatcgacaaagaggctcccgtttctttgttcaacatggtgatagagctgacatcgatctgaatcagagtgattgtgataatgaagatgacattaacactgcagaaaaagtacctatagatgacatggttaatgtatgtgatgggcttattgaaggaccagagcagtgttcattcataacagaaaaagaaatcatgtcagtttataaaatgagagccttgggctgggcgcagtgtctcgagagcctgtaatcccagcactttgggaggccaaggcgggcagatcacttgaggtcaggagttcgagaacagcctggccaacccggtgaaatgctgtctgtactaaaaatacaaaattagctgggtgtggtggcaggcgcctgtaatcccagctactcaggaggctgaggcagtagaatcgcttgatcctggaaggtgaaggttgcagtgagctgagatcatgctgctgcacgccagcctgggtgacagagtgagcccccgtctcaaaaaataaagaaatgaataaaatgagatccttctagacaatactcgttgttaatgagacagatgactttagaggaaacattttaaaaagcyatcccacagaatgcctcttcattcctagaggacttcctggttcctaattgcttctgatgatgtttcttcttaccttataaaataaaacagtatacagtaaccttttaatcaaaacacagcatcatagatggagacacaaagcccgacattgttattactgtttttttatcagctgatacatgtattctcgtgatactactgtgctgcttagctaccctgaacacacattactttttcactgtattaatggtatgtcatatttttactgttaagtacttatgtgtgaataagtataagaaaatgtttgcctgtcagtagcacataaattcagagacaggaatgatggtaatgccaaacaaccacagatattccacatggtggctgagataatgacacttttgctttcttatggttcactgtacacaaactttgtataatgtagaaaataaatattttgtaaaattaccttcaggctatgtgtataaaagatgtgtgtaatacataaatgagtttggtatttcaatttgggtcccatccccaagataacttattatatatatatgcaaatattacaaaatatgaaaaattctaaatcacttctgatcccaagcgtttcagataaggcatacttagcctgtaactcaagatgtattttacctatttacctgatctagatgctacatttttgttaggtatatattagctttatatgtacaggtgtcagtgactataagacctggctttaaatttaaccttttccttaattttggatgggccacatatattctattatttgtgtatataaggtaacacaagtccttttgtctccccccagctccttttgcatatgagaaaacataagccattttgtgcctcttgcatcttaagccatagtctattttactatgtggtttcccatctggttacttttgggagtatcagatggtmtcataaaaacagtgggttttcctgaagctttttgattaatgttgaatttgtttatcatcttttagctgtgcggtcagagaagaaacgccttaggaagccaagcaagtggcttttggaatatacagaagaatatgatcagatatttgctcctaagaaaaaacaaaagaaggtacaggagcaggtgcacaaggtatgttgcaaaatttcagcaaactttcactggtccttaggaaactgcaattttatcttcaatgtcatactttatcttcatgaaacaataatttccttaactgagatcttgttttttattctcagcttctagcacagtacttaggatttagtggttattcaggaaatatataaatgaatctacatattgtatttatttatgtatatatttttccctctttgccttcaaagagtaatgacttaggaatattgttatgatttaatcttaagtaaaaatataggctataaagtgaaatatatatagtctgaccctaatttcaaaagtaaatatatcttatttgtcttatttttcaactcagttttttaaaatgaaatagagacatcttgacattctacccctacatagtttaatatgtagttaaaaaatggaacattttcctttataatcaatttaacatatttacatcttatataagatctgtttatctgacatcaactgtctttcaaatttcatcaattatcccctaacctttacctttggattattcataccaggactcaatctaggactgctcattgtaactggttgttatggttctcaaatcactttgaattcagaacaatcccttttttcatgatcatgatcatgtctataagagagtgacatataaagtcatctactttctgtatttgtgtaattgcttcctcataggtgtcacttagattgttttctctatctcctgttctctgtcaaatggaagatagaacctatcagtttgatagattgaaagttgaacatttttagctagactatatcagagatgataatgtggaatatattgtacattagagggttaaaaaaygttttattcccatcagccattccctgacagtttgttctttcttttttaaaattgagacagtgtcttgcccaagctggagtgcagagatgcacgaacacggttcactgcagccttgacctcctgggtttaagcaatgtttccgtctcagcctcctgagtagttgggaccaaaggtgcacactaccacacctggctaatttttgacaacattttttttgtagaggcggkgtcccactatgttgccctggctggtctcraattcctgggctccagtgatctttctgcctcagcctcccagagtgttgggattacaggtgtgggccaccatgcccagcttccctgatggttttttgaaaaccccagttgaagatctttacctatatcaataattttattagaggttacaaaatgaagactttcagattttattattttctctatttttattaactgatagtctctttcattaattggactctgttattgtcctgaaatacttgaaaggcagaataagtgcttctttctttcccattaattaccaattgtaacattaaggagttcattagtagttgttttaattggagacattagagcagtctctttcccctgcttttgaattattgttgtggacttatcaatattatagcttcagtgtatctcagtcaacttcatttaattttggttaaaaaaatatatatatataatgtaaattttattattttatctttttttttttttttttttgagatggagtctcactctgttgcccaggctggagtgcagtggtgtgatctcagctcactgcaagctctgcctctcctgttcacaccattctcctgcctcagcctcccgagtagctgggactacaggtgcccgccaccacacctggctaattttttgcatttttaggtagagacagggtttcaccatggtagccaggatggtcttgatctcctgacctcgtgatctgcctgccttggcctcccaaagttctggaattacaggcgtgagccaccacgcccagcctattttatccatttttaagtgtacagttcagtagcatgaagcacagttagattgttgtgcaaccatctccaccatccatctcgataatttttttcatctttccaaattaaaaatcaatacccattaaccaataactcccttttctgctcagcccctggcaattgccattctattttctgtctcaagaattttcttattctagatacctcatatacttgaaatcatacgatatttgttctttgtgtcttaagtaatttcccttagcatacataatgtcttcaaggttcatccactttttgtagcctttgtcagaatttcattccttttaaagtgtgttattctttttgacacttaaattacaacaattttggcctgtggactctatttttattttttgttcttaggtaagttcccgctgtgaagaggaaagccttctagcccgaggtcgatctagtgctcagaacaagcaggtggacgagaattctttgatttcaaccaaagaagagcctccagttcttgaaagggaggctccgtttttggagggccccttggctcagtcagaacttggaggtggacatgctgagttgccgcagctgaccttgtctgtgcctgtggctccggaagtctctccacggcctgcccttgagtctgaggaattgctagttaaaacgccaggtaaggtggggttggggtctcagtatttgagcagatatgattagaggaagcaggagattttagtatgttttgatgtaaagccaacattgtatctrtatacaataaactacccccttttgtcctgggaaatacttaaaatgatggttaattagatatagttactaaccatgaactgtggcacactatcaagaagatgtatttttaataactatgctccttgctccagtgttgctcttcatgattgttgatcagccactgtgtaaattaacaaccaggataacagggcttcaagaggagtactgcacattagtggaataagcactatgcttcaagtgctggctccaccaatccttgtgttacttgggaagttrtttaatctctgaacttgtttcctcatctataaatggagatcataatgtattaatgtgtaatgttatatacctgacaacatagtaattaccagttcattagaagttaattaccagttacttctcacttgatcattctttatatatcacctggggagagttggatctaaacatattgtctctaattcaccttgtaactattgaatattatagtcagtcaaggaatggcaagaatcctcttttctgtacccctttaaattttggatataacttttttacattatcaacagtagcttttgatgttattccttaaagaaacgattccaattgtgcttaaactagttgggtataataaaaaagatttttgaaagaacagtaaagatagttattatttcagtacctactatgtgccaaaactctattaagtcagctcttttatattattcttgagtgatcctatgaattatcttttacctattgaattttatttacttaggggcagagcagaaactataatctttgtccatttatgaccatgatccaagttctatttcactccacttctccttattttatcctcaccaacaatcagttgttataaaggcagttccgtccttctgacttctcccttagtgattttgtgagttaaagtcaccacacacacatccctcacattagttggtgcttgcattgaaaactgtttacttgttttgtttactaatattttataataagcaaattaccatcctgcctcttcccataagatgacggggaaaacatcaaaaacattgagattcattttgtgtggtatacagattttttaaaaattaacttgtgcccagtttctaaatcatctaatgtaaagatacatgcatttcaggaaattatgaaagtaaacgtcaaagaaaaccaactaagaaacttcttgaatccaatgatttagaccctggatttatgcccaagaagggggaccttggcctttctaaaaaggtatgttatttttgtaagttctaaaagaaataaactcaggaaatgagaaattttaaaaatgacattttgagtagcagttataacattgatgtacatacatatagaaattagtgtgtgtgtcagcagtcatacrtgatctgagatttcctacatgaaaggctgttttgcagttgtgtgaccatgtatgtgtataaactggtttcaggtttcctttccaagtgaaaaaaatttttaaatgctttgaagattaagtttgtgtttgttataatttcttttctgggttcaaatcctcttacctgttttctactaaactactatctcaaatatcactagtctactctcctattgccgtgtcgtcgtagcccttttgttttgtttttttgagacagggtctgattctgtcacccaggctggagtgcagtggcataattttggctcactgtaatctctgcctcccaggatcaccagttaattttttgtctttttttggtagagactgggtatcaattttttttttatgtgataaatactttttgtgttttattcaagaaatctagtgtgatggtggccgggcgcagtggctcatgcctgtaatcccagcattttgggaggctgaggcgggcggatcacaaggtcaggatatcgagaccatcctggctaacatggagaaaccccctctctactaaaaatacaaaaaattagctgggcgtggtggcaggcgcctgtagtcccagctactcgggaggctgaggcaggagaatggtgtgaacccaggaggcggagcttgcagtgagccgagatggcgccactgcactccagcctgggtgacagggcgagactccgtctcaaaaaaataaaaaatctattgtgatggctcaagcctataatcccaggacttagggaacccgaggcagtaggattgcttaagctcaggagcttgagaccagcctgggcaataaaggagaccttgtctctacaaaacaaaaaactgtcccaaaaaaaccccagaaaatggtgtggtgttgcatgtctggtcccagctactcagaaggctgaagtggtaggatgtcttgagccccagaggtcgaggctgcagtgagctatgattgcgctattgcactccaccctgggtgacagagcaagaccctgtctcagtcaatcaatcaataaatgaaatttttgtgtgccccatggacacaaagatgttctccctgtgttttaggagttttttggttctggtttcacatatagatctttgttccatcttgaatttttgagatggagttttgttctcccccatattgatgtccagttgtttcagcaccatttaccaaaaaattgctgatattggctgggtgcggtggctcacacctgtaatcccagcactttgggaggcccaggtgggcagatcacttgcggtcaggagttggagaccagcctggccaacatggtgaaaccccgtctctactaataatacaaaaaaaaaaaaaatggctgggcgtcgtggtacctgcgcataatcccagctactcaggaggctgagacaggagaattgctggaacctgggaggcagaggttgcagtgagtcgaggtcatgccattgcactccagcctaggcgacagagcgagactctctctctctcaaaaaaaaaaagaaaaaatactccctgatatttatcctcaccctctcttagattcccagtatcttttaagtattaattatacttaataactcttcgtcacggttgaatttttacttttggggagagggggttgccgttaaatttgggatcagagcaagagaaaatcagaattattggttatggctagcaccaaactctggagaaaagtgtcctcttgtctgtttgggagtctgtcctgccatctgacctggcctacttcattgttgaagtcctggttactctgaggtatattttgtcataaggctaaagycatgattcagttccattttagtttaccaggcacaccaccaccctgtctgcaggtggattaatcagtatgtcaaacagaatgagagattgatctgttctggtagtgctttaagggtactctggcttaatgtatatccacactagactatatatacaaagtaagttactggcatcttagtcacatcctctaagaagttctttggtctttttcrttctaaacagaatagtttgatttttattcatatggtatgattgttgtgtgtgtgcatgtgtgtgtgtgtgtgctgttaatttttattttaagttataaaattgatcataatagaaatgagactatttcctgcattattctctgactgtagtttggggagcattgtaattattttgttccacagcttttgggtaactgttaaacaatgaactaatttgttatctaaataaaatgattgctattttaaaaaaaattacagaaatgtattttgtggatttgtctaggagtctcgttttgttgaattggatacctgacatttgcccattcattttacttgaaatagacttctgatatatagtgaacgtgaggagaattgcagtcttatgatttattaatatgataaaatgagcattcagaaattcacagctgtattttatcttgttttacttccaaacattaggaactctacaacaaaaatggcctttattatttatttatttatttatttatttatttgagacagagttttgcttttgttgtctaggctggaatgcaatggcacaatctcggctcaccacaacctccaccttccaggttcatgcgattctcctaccccagcctccgaagtagctgggattacagggatgtgccaccatgcctggctaattttttgtatttttagtagaggcagggtttctcaatggtagtcgggctggtctcgaactcccgacctcaggtgatccgcctgcctcggccccccaaaatgctgggaatacaggtgtgaaccaccgtgcccagccagaatggcctttactatgctaactttttgtgaccactaaatgttgttttacagttatgatgaagaatatcatcattcttgtaggaaaagacatttgcttggggtggaactaattcatagaagtatattagtagtgggtgaggtgaataaaatgtgtggctcttgattagactcctgatgttgagtatttgttttgagttttaatgttgctttaatttggattaatctgaagtcattttaagttggaatgtcattcagtatttcagaactgtttaatttacagttcaccaggtaaacaggtctctgtcaaatctaatagctgtgaatacaattgtaggaagatgggttatttttctttctttctttctttctttttttgagacttgctctgtctcccaggctgttgtagtgcagtggcgcgatcttggctcagtgcaacctccgcctcctgggttcaaacagttctcctgcttcagcctcccgagtagctgggattacaggcatgtgccactgcacctagctaatttttgtataatttttagtagaaacggggtttcaccatattggccatggttggccaggctggattcaaattcctgacctcaggtgatctgcccccctcggcctcccaaagtgctgagattacaggcatgggccactgcacccagccatgaagatggattttaagtacagggtggagtgcaataaaattgagcctgtggatctctgggtacataccccttctctttctccatccatttcagtcacagaaagcattgtgtatctagtctatatgttggaaatctctggcaagtctttattttttcttaaggagtaggtggtgttcacaggtctgttggagcattgtttttgttttgttttaagatggagtctcgcttttgttgcctagactggagtgcagtggtgcgatcttggctcactgcaacctctgcctctccaagttcaagcaattctcctgcctcagcctcctgagtagctgggattacaggcatgtgccaccacacctgactaattttgtatttttagtagtgatggggtttctccatgttggtcaggctggtctttaactctcaacctcaggtgatccacccgcctcagcctcctaacgtgctaggattacaggtgtgagccatcatgccctgtctgttggagcattttaaaatctgattcctttccccctgaagtttccgttcaaccctttactgtggtcaggttgatttctttaattgctaaaacaagtcaaaattcaatatccatggcagctgacaattcagactttggcatataaagtaaagggtttattttttcattcctctgtaaatggtgttgttttcacttatttatagtgctatgaagctggtcacctggagaatggcataactgaatcttgtgccacatcttattcaaaagattttggtggaggtgagtatttttgagatttaaaaaacgtaatgcagtagtaagtttgaagtgctttgtctgttaaccacaaaaattgttacatgtgtaagcccgaccagtgaggtacaagttttaaaactggtttgcccaaaatctgcttcctgaaaaagaaaaaatattgataaattgaatatctactctaccaggacttttagtaggaatgctacctgtaatctctctaaagcgttacagagagttaggttattatctatagtattcctgttttatagaagaaatgtgaagatgaacaaggtagcaaggtcagggaactaaatccacacctgaccaatttcatggtcatactcctgtcttcttatccaccccaggttttctccatgccacttctttcttccactcttcatttgtctgccaatgccatttattgattagtgtcatttttgaaatattattccagatttgagcacactgcaacagatgtggtctgctagcaaagagtatcatgggaagattatatttcatgtggcctacgattattaaattttctaacaagtaaatctagcaacatgttagcttattttagctatgtgacaattgtaatcccataggttggtcaatttgcttgtaagatttaaaaataagctgctttcaaaataatatcaggccgttcatggtggcccacaactgcaatttcagtgctttggaggccaagataagaggatgacttgaggccaggtgttccatccagaccaggctcggcacttagtgagaccctgtctctatctacagtttaaaaaaatgagctaggcatggtggtgtatttctgtagtcacagctacttgttaagctgacatgtagcttaacatgttcaaggaacgatcccttgaacccgagaggttgaggctacagagagctgttgctcacaccaggcactgtagcctgggcaacaatgcgagaccatgtctcttaaaataatagtagtaataataataacaacagctcttttcctgtatttttatatttcgtttttaaaataaaacctacaacatgaactttatccattataaattttgtgttaagtgttccagctcatgagaatttcaaatctttctattgtgctcatattaactcttcttttagtgttaggctgcgagcagttttgatggcagagcttctccaactcaatcaggcagtcaaaaaagagctcactgaggcagtcttcaaaactccagctttcatactgttaactagcacagatatcctaaatgttttatgaaatacctcttagattcctctttatgtttctataacacagttgaaatgtgtttaacagaaagtgcaggagggactagaagaatttctttcttttttttttttttttggtttgagatggagtctggctctgttgcccaggctggagtacagtggcacaatctcggttcactgcagcctccacctcccaggttcaagcgattctcctgcctcagcctcctgagtagctgggactacagatgtactccctcacgcctggctaatttgttttgtatttttagtagagatagggtttcaccatgttggccaggatggtcttgatctcctgacctcgtgatctgtccaccttggcctcccaaagtgctgggattacaggcatgagccaccctgcccagcctcaaccctccatcttaatccttttattttwtttattttttwtttttttttgagatggagtttcgctcttgttacccaggctggagtgcggtggcatgatctcggctcactgcaacctctacctcctggtwtcaagtgattctcctgcctcaacctcctgagtagctgggattacaggcatgcaccaccatgcctggctaattttgtatttttagtagagacaggatttcactatgttggtcaggctggtatcaaattcctgacctcatgtgatctgccggcctcagcctctcaaagtgctgggattacaggcttgagccacggtgcccagtccttaatctttaaatcatatagtgatttgtattattgtctccagtcttgaagtctagggagtggtatcttttgatgactagtaaaatgcatttccccttcatctataggatttaattcctttgaagaactacaagatttgtcatttcaatcatataaattaaaatttctgtaataacctatacacttactatttaatctatatgagggagcagttacatatatgtagccatttcccttcttgttatgtcatcatgagttagtctcaattattatttcccccgttttcctaatccacaaagctggagaattaaatgagttttaaggttggtttttattctaataataggataagagattttggacatgtgtgttagtagccagcagttaacacctattttcctgtcataggcactaccaagatatttgacaagccaaggaagcgaaaacgacagaggcatgctgcagccaagatgcagtgtaaaaaagtgaaaaatgatgactcgtcaaaagagattccaggctcagaggtattactcagttcctgatcttttcaccttctaaagagaagctacttttcacgccagaggccacatccctctttcccttgagttttcttaagaatactrttctactgaaatggctgatggccataaggaatcttggaggaaaagtagagccttatcctaataataaggcaaggcatgtattgcagctgtcaatatggtctttttaaaagatcatcacatcctatgctgtaggtgtccaatcaggtatataagtgtttcatcgttaagtaaacttgtaaaaccggagagtacaatatcaagtcaacatatgatctgaaggaacatagatactgtcctataaaagttgagactggccaggtgctgtggctcacgcctgtaatcccaacactttgggaggcygaggcgggaagataacttgaggttgagagttcgagaccagcctcgccaacatggtgaaacctcatctctactaacaatacagaaattacctgagtgtggtggcatgcgcctataattccagctaatcgggcagaggcacaagaatcacttgaacccttgaggcagaggttgtagtgagccgaaatcatgccactgccctccagcctgggtgacagaatgagactctgttgcaaaagaaaaaaattgagactgctggctgggcgttgtggctcatgccactcagctctttgggaggctgaggtgggaggatcatatgagaacaggatttcgagaccaacctgtgaaatacagtgagaccttgtctctacttaaaaaaaaaaaaaaaaaaatcgagactgctgtggttagcgggaagatttacttgcttatttcttgagaccatcagctacttaatcttaggacaatttttatgaatatcggccttcaggaaacaaaagatttaaaaccatttacttgcaaagcatcagtgcaatcattgatattatcttcgggtttccaactcaggttaaaagagagaagtcaggtcagcatcacacattatgatgcagaatgtttctttccaggacaatttgaatagaatgcccaagaggggcattatttaggaaacactgatcttggaaggacaaataagtaatcaaataaacttaagaatgttttctctcccttagtgaaaccttaaaatggaacagctcagaaagttccagtggaacaaacagcctcagagcagttagtggcagggcatgaggcgcccactacccgcccaatcacagcagggttagaactaacattgcatgcagtccgcccgagtgattggctgaacatctgtaagtgcttaatggctagacaaatagcagcccagagggagggggtcaaatggaagagacatcaataatacagatgtgggacattattttttctttgcaagggagaactaatgcctcacaggacggccacaagccccaaggagactgttgaggaaggtgtagaacacgatcccgggatgcctgcctctaaaaaaatgcagggtgaacgcggtggaggagctgcactcaaggagaatgtctgtcaggtagagaaatgtttgcccacttgtgttttcattgcatgttcatctttaaagggaaacccactccatctctttatgatggtttcttggtagaataacaatgcttttggatgattccagtggagtcactttctttaaggatttgacccctttttttctccccacaaagaaagatacttggagaaatagtttagtgttggtgaaccacstgcccttaaggcccatgaaggaatatatgccgcgaaacaagtctgagatggaatatgtgaatctctggttgcttattcaaatataattctccagtacttctcatggtgtcacaatctttgggtttgtaagaaacttttcaagggtaattttagctttgagatgtttttcctttaatgtggtgactttagaaagcctaccacctatattgttttatttatttaataaatatttgtagagtatttactatgtatgaagtattgttccaagcactttataaatattacattatttagtcatcctaataatctcataagtagagttctatgattattcccattttgcagatgaggaaactaaattacagagaggataaatagcttgtttatattcatgagagaagcctggatttaaacttcggcagtctggatttagagtctccctctccgtttttctaacctttaagctccgttggacttggttggtttagagtcttaaccattttgttggattgcctctctgtgagataggggattccactttattgttagagacttgaagtctttgtgagtagagtcaatgaccatttgaatatatatatttttaatggtcttgatttacctatgtaattcttaaaatttagtatatacaaacttgaagttaggcaatgcgcagtggctcatacctacaatcacagtgcttctggaagctgaggcagcaggattgcttgaggccaggagttctagaccagtctgggcagcacagcgagacccctgtctctatttttaaaaaatttgtcttttttttaaattagccagctgyagtggctcatacctgtagcccaacaggtcaagattacagacttgtcttttaaataaacaaaaaacttgaggatgttagtttttcttttttcttttttattaattaattatttatttatttatttatttatttttgagacgaagtctcgctctgtcggccaggctgcagtgcagtggcgcgatctctgctcactgcaagctccgcctcctgggttcacgccattctcctgcctcagcctcccattctcctgcctcagcctcctgagtaccgggactataggcacccgccaccatgtccagctaattttttgtattttttggtagagatggggtttcaccgtgttggcgaggatggtctcgatctcctgacctcgtgatctgcccgcctcggcctcccaaagtgctgggattacaggcgtgagccaccacgcccggccagttcttcttttttaaattgaaaccataggccaagcacagcactaatctcagcactttgtgaggctgaggtgggtggatcatttgagcccaggaatttgagaccagccaggcaacatggtaaaaccctgtctctgccaaaaatacaaaaattagccaggcatgacagttcgtgcctgtaattcccctgctggggaggctgaggtcattggatcacctgaagctggggaggtagaggctttagtgagccatggtcatgccactgcactcccacctgggtgactgagaccctatctcacaaataataaatagtaatagataaataagttgagatctctaaaaaagtaaactcagaccagaaaatgttattgtggccaatataatttcaatccagtttctttgcctattatcttcactattacattcttggaccagatcccaaacaacagtcttaatcctcaaaaacagttatgcccattatttacttagtgagacaagtcagagtgtaaatacattttacaaagatcatttaatgaaaaggttaaaggtaaggtgaccctgtggtcctggcttgtctggatcagtctttgtgtaggtcccttgtgctgtcacaatttattaatagcacttcttttcactctcaggtgtcccggtttgaaagataaattaygtggttatcccagttgaataattagtctataacatttagttaatgcaaaaactttatttctaattcacgttgtaattaacgttttcctatttaagtgctgaaggtcagtttttttttttttttaccatatatagaaacgttattggcactctgaatatgcaaagtacaatatatagtgctatttttcagtttttatatgtgaatagtagataatggggagtcagacatttgaggatatctcagactataggttgataaagtccctgagttcccctatcaattccaggctacctctctaacctttctccctaaagctgtcctgttttttatttaagctttgattcttaagtgatcaagacctattctgtttctatgagttcttgaagctaaaacttacttagtcacctttccccttgtttgcttttcatagtagtacaaggctttaaaaatatttgggctgggtgcggtggctcacacctgtaatcccagcactttgggaggccaaggtgggtggatcatgaggtgaggagtttgagaccagcctggccaacgtggtgaaaccccatctctactagaaatacaaaaattagctgggcatggtggcgcatgcctgtaatcccagctactcgggaggctgaggcaggagaatcacttgaacccgggtggcagaggtggcagtgagccaagattgcgccattgtactccatcctgggcgacagagcaagacttcctctcaaaaaaaaaaaaaaattgataaatcttacaatgttttatagtgacagatgcccattgttatttcctaagcgcctgtcttaagtgaggccctatcttagctgagattatttcagaaaagtgatctctctctgggatggttgtaggtatgtcccaaaagggctgtttagaccttggtgggagctcttttggaactttatgatccaactctagctagccagtgtctgttgcttgaaccattcagtagctttctggtttatctctatgctcttttctgacctttctactcttgaactcgttttccatgtagcagtcagaacagtctttttaaaaatgaatacctgattttagctttcctttgttaaagctctccaatggtacacctttgtaactagactaaaatctacaactacgggcccttgcctctttctcacctccttttctgccacttttaacctttgtttactttaacccactgacactggttttactcttgattctcaaacatggaaaaacagatagatgttttctttctcttaacagaattgtgaaaaattgggtgagctgctgttatgtgaggctcagtgctgtggggctttccacctggagtgccttggattgactgagatgccaagaggaaaatttatctgcaatgaatgtcgcacaggtaaagtagatatcgaacggtcttcctccaaagaaagtttgaattttaagtttttcaggaaagacatttattggagacactattttgtggcaacactgggctagttgttacagatatagaaatggtgctgtggggtcactgctttcagaaaagctaccaagtgaataataaatgggtagcataatacagtgcaaaaagcattgtgttggtgatacatttagaatgtaatgtaagcaaagatgagctgatgccatagaggaagatatctgtgtttagctttaagagagaaagagaaattgatgtcgggaggggaagtgcagaaggtctagtaatgaaagcgtgtaaaacatttggggaatatggaatacaggccaatgtgtttatagagtttaggatattttaggtaaaaggcataggcagtaactaagagggcttcttggttactggtaatattttatatttcttaatctgcgtagtgattacatgagcatgtttacttcatcaactatactcttaggatgcgtgtactttatggtgtgtacattatacatcgataaaaatatttaccaaaaaagtaaaaagattatttgcgggttataatgcttagattgggttagaaaataggaatagtcagctgagaccagctggtaaagcacttcataaagctgcgctaaagtaaagtgttctttttttttttttttttttaataagagagaggtcttgttgtccaggtttgagtacagtggcgtgatcatagctcattgtagtcttgagctcctgggctcaagcaatcctcccaactcagcttcccaagtagctgggactgcagccacttgccaccatgcgtgggcaattttttttattttttgttgagaaagggggtcttactatgttgcccaggctggaaagtgttctctcgctctctctctcctttttttttttttttttcttagcatgatgtgtagatgttacagcatgtaaacagtgaagaaatcagggctgaggtatagatcttatgcctgtaagtcattgaagctgcacatctggatgatacttcccaaagaaaaagtgtcattagggtaggataatggtcagtgacactacctgggcgtatatgctcttataacgagttactggaaggagaggaggagctagtcaatatctctgaagccacaggagtcaggtgttatctgtaggggcagatgcagcaaagatactaaggaggttctggagtgaagagaggcttttgtatgtggcagtgagaaaatgcttcaatttttgccagaggatgtctcattacactagattgaagggtgagtggatagccgtatacataacttcttgaagaaacttgacttcagcagaaaggaagacagtacctaaagggaggatattatagggtcaagagaaaaatcattttgagtgtgtaaaacagctctattaaggtaaaattgaagtgcaaacaattgcacatatttcaggcctatgagttgataaattttggtatgtgtatatgtatgcatctgtgaaatcatcactcagcattattattttgagattcagtcaggttgttgtgtgtattgatagttcatttctttttattgctgagtagtagtttgttgtatggatttacttggttgttgatccattcatctgttgatagacatttgggttgtttcccgttttggttattataaataaagctgctgagaacattcaagtttttggacactttgtaccctccctgccccttccctccccctcccatttttcttttttttccttgagacagggtctctctctgtcgcctagtctggagtacagtgatatgattctggctcacttcagcctcaacctcccaggctcaagctatccttctggctcagcctccttagtagctgggactacaggtgcttgccacatgcctggctaattttttaaaatatttttgtagagacaggattttattacattattaccaggctggttttgaagtcctgggatcaagcagtcctcctcgttcagcctctgaaagtgttgggattataggtgtaacacacaattcctggccacattttcttttttcggtttttgtttttgtttttgtttttcagagtcttgcactgtcacccgggctcgagtgcaatggcgcagtctcggcaacctccgcctcctgggttcaagcaagtctcctgcctcagcctcccaagtagctgggattacaggcatgtgccaccactcctggctaatttttggatttttagtggagacggggtttctcctgttggtcaggctggtctcggactcctgacctcaggtggtccactctccttggcctcccaaagtgctgggattacaggcatgagccactgcacctggccaactttttcatattcttagtgatgtatttgtaagactaatagttcttaattttttgaaatccagtttatcaatttgttctttttatggactgtgatttgctgtcatagctaagaagttttgcttaacccagtgtcacaaagtttcgttgttgttttttttctttttaatctgcgacagagtctcactctgtcacccaggccggagtgcagtggcgtgatctcagctaactgcaacctccacctcctgggttcaagcgattcttgtgcctcagtctcccgagtagcaaggataccaggcgtgcaccaccatgcccagctaattttgcatttttagtagagacgaggtttcaccatgttggccaggctgttctcaaactcctggcctcagatgatccacctgctttggcctcccaaactcccaaagggctgggattacaggtgtgagtcaccacgtccaaccagtgtcacaaagatttttagttctgtgttttcttcatagaattttttagtttcacatttcactattaggtctgtgatgtgttttgtattaaagttttgcatatgacatgaggtatagagaagatagaatttttttatttttggttttttaaatttgtgggtttttttctctttttcctaggaaagctattatctttgagagtaggacattttaccagttttggtacagtgtaagaaatgggagtcacttattagtgctcttggctcaccctattttcctgcaatagggtggtcacatcattgtttagattgcttaggtttaataatagctaccacgcctgtaatcccagcactttgggaggctaaggtgggcggattttttaaggtcagaagtttgagaccagcctggccaatgtggtgaaaccttgtctctactgaaaatataaaaattagccaggcatggcggtgggtgcctgtaatcccacatacttgggaggctaagtcacgagaattgcttgatcccaggaggtggaggttgcagtgagctgacaacatgccactgcactccatcctgggcgagagagggagattgagtctcaaaaaaaaaaaaaagttaccagttattcagcatcaggtagtgttttccctgtttacaaatacatattcaaatattgttcttaaaatatttatttgctggatgttctcagtgtttatagataaaatggatgatttgaatgagccgtttccagcaattacctgtaggaggattcatgttgaggtctgtttacctgtcaagcttaggctctttttcttatgttgtactgcatctcacagagagatagaggtctgtggtttttgttttgttttgtttttttgttttttkgttttgtttttctgagacagtctccttctgtggcccaggctggagttcggtggtgtgatctcagctcactgcaacctccacctcccaggttcaagagattctcgtgcctcagcctctgtattagttgggattataggcgcctgycaccacacccagctaattgttttgtatttctagtagagacggtgtctcactatgttccccaggctaggcttaaattcctggcctccagtgatccaattgccttagcctcccaagtgctgagtacattgcttctgggtggtttttgactttttattacaaaaatcttaagacatacaccagggtagaacaatgtaaagaatctccatgtattcagttaatttcagtagttatcaacttctctctcattttctccctatatttcaaaaggtttctaacacaacatctaatgtatagcgagaatatgtaataacttctttgtgtcatctaccagccagttcattttcaaattttctcatttgtctcagggatgtctttttattatgttttgaatcaagatctagatccagagagaggccaaaaacgtctctgtaggttttgttagggagattaccagcattgtatgtcgggtgatttcctgtagtgtaaacttttttatacatctcttaagtttctacttatctttaacaatactgcccccacactttttttttttttttttttttttttgaggcagggtctcactcttatcacccaggctggagtgcactggtgtgatctcagctcagtaaacctccaccttccaggctcaagcaatcctcctgcctcagcctcttgagtagctgggaccacaggcatgcatcaccacgcccagctaatttttgtatgtttagtagagatggagttttgccacgttgcctgggctggcctcgacttcctggactcaagccagccactcacctcagcctcctgaagtgctgggattgtaggcgtgagcctcctctcccagcccaacttaaatttcgttggttgcctcctggaggtatccccttaacttgttcctctgtcatccatatttcctgtaaacttgtagttagtccaggggcttgattaggtttaatttcagttttttctttttttggcgggggtgccagcggcaagcattttctgtagacaatatgtaytttctgttgtatcacgtcagggagtatctattaccagrttgttcatttataataatactaagattgttacagtgggttcagacgatgtcaaaccgatcagtccattataaaatttcttatgaacttttcacctaatggtttagcatttggtagattcttgaattcttactaatttatcttcttttggcttctcaggaatccatacctgttttgtatgtaagcagagtggggaagatgttaaaaggtgccttctacccttgtgtggaaagttttaccwtgaagagtgtgtccagaagtacccacccactgttatgcagaacaagggcttccggtgctcccyccacatctgtataacctgtcatgctgctaatccagccaatgtttctgcatctaaaggtatggatttcttatgtggaccagtctaattgtaaaacctcagtttaattggcaacagatattttcttttttctttctttytttttttttttttttggagacagagtctcgctgtgttgccgaggctggagtgcagtggcgtgatcttggcccactgcaagctccgcctcctgggttcacgccattctcctgcttcagcctcctgagtagctgggactacaggcgcctgccaccatgcctggctaatttttttgtatttttagtagagacggggtttcaccgtgttagccaggatggtctcgatctcctgacctcgtgatccacctgcctcggcctcccaaagtgctgggattacaggcgtgagccgctgcgcccggccggcaacagatattttcaaatgcaatcaatccaccatgtcactttatggcctctctctagcttttatcagagagattaccaacattgtatttgggagagaagaggggcataacgaactagttcagcagccaggcaatgccagggctccatagaacacaatgtggtcgtgtggtagggtattaaatatttggatttcatgtgagatgtagtttgagaaagtgttctgctgcatgtcctcttccccctattgattagaaaaccagagtgtagtcttcccctgggctttttttttattttattttattttattttattttatttttttttgagacggagtcttgctctgtcacccagtctcctcgatctcctgacctcgtgatccactcacctcagcctcccaaagtgctggcattacaggcgtgagccaccacgcgtggcccccctgggcctttttttttttttttttttttttttgagatggagtttcgcttttgttgcctgggctagagtgcaatggtgcaatctcagctcaccgcaacctctgcctcccgggttcaagcgattctcctgtctcagcctcccgagtagctgggattacaggcatgagccaccatgcctcgctaattttgtatttttagtagagacagagtttctccatgttggtcaggctggtcttgaactcccgacctcaggtgatctgcctgcctcggcctcccaaagtgctgggattacaggtgtgagccactgcgcccggccggccatttttatatctctggtttcagtgtgatatcattcaraaatgcatgccaaggcaggattgggggtttcgtgttgatttgttttttgtttgtttgtttttttaatgaaaactcttgtcctagaaattttcttctgcttcatagttaagctgagacctgagttttccaaaactgtctgtgcatataggtaaacttaagttttgaaatgtgttctctttggtaaaacaagttgtttttgttgttgttgttgtttgttgttgtttttttttttgagatggagtttcacttttgttgcccaggctggagtgcaatggctcgatcttggctcactgcaacctccaccacctgggttcaaatgattctactgtctcagcctcctgactagctgggattacaggcacatgccaccatgcccagctaatttttgtatttttagtagagacagggtttcatcatatcggtcaggctggtctcgaactcctgacgtcaggtgatctgcctgcctcagcctcccaaagtgctgggattataggcatgagccactgcacccagcatgtgtttttttgtttgttttgttttgttttaaaacaggaggtctcgctctgttgcccagtgtgatctcaactcactgcaatgtccacctcccaggttcaagagattctcttgcctcagcccctggagtagcttggattacaggtgcttgccaccactcccgactactttttatatttttagtatagacggggtttcgccatgttggccagactgttctggaacccctgacctcaggtgatctgcctgccttggcctcccaaagtcctgggattacaggcttgagccaccgcgcctggaaaaacccaatactgtatctctgctggtgaattcatgtgtgccaaaagaaccttgactttttccatagaggattgaggaggtaaaatttagcagtgttgatgtttgttttaatcagactgtcagtaccttttttaggattatttcctggcctcatgggtctcataagtaatttcacttgttggatcaaaattgcagtttcgatgagtgtgatggtgtacacctgtatttccagcttcttgggaaggtaaagcaggaagtgggaagactgtttgagcacacagactttgaggtcacgtccagccttggcaacacagggaaaccccatgtctttattaatacaaagaaaaatgaaaagagttgcagttggctaccttctcgtttttaattgttattacagattgcattagagggtttggtggtggtttcgtgatggtttataatagatgaagtatttgaggggatgtgtttcctctggagagggtagagaggttcgttcacttgaaaggctttaaaagaatcacagagttccaggcaagcattattgttgtctcccctctccctatttattctggggctgatttcctagttgtcaggacagtggtttgagttgggctttcccttgttgaagcaggctcactgacagttacgggatttgattccttttggagacttatcacatagctcccatctgagttttcttgatggatcgagtgtttaagatccatcatcttagtggtcattccttctatttgtgacattttttcagtgctaacaaatagacttgaataactcacattctttttatatttaatatttttgtttttcttttgcttgtccctgattttcctgctttaggtcggttgatgcgctgtgtccgctgtcctgtggcataccacgccaatgacttttgsctggctgctgggtcaaagatccttgcatctaatagtatcatctgccctaatcactttacccctaggcggggctgccgaaatcatgagcatgttaatgttagctggtgctttgtgtgctcagaaggtaagaaatcatttcttcctctatttgtagtctaaaaagggattaaatcaatgttttaattggaacaaaaatacttttcatcatattgccactggaaaaaatattagaaatgatactattcatctgccattcaggaaatgatgtcccgaattaatgattacatagcagaactttttttttttttttttttttttttgagacaacgtttcactctgttgcccaggctggagtgctatggcacaatctcagctaactgcagcctccacctcccaggttcaagcagttctcctgcctcagcctcccaagtagctgggattacaggtgcccgccaccatgcccgactaattgtttgtatttttagtagagacagggttttaccatgttggccaggctggtctcaaactcctgccctctagtgatttgcccgcctcggcctcccaaagtgctgggattacaggggtgagccactgtgcctgtccagcagaactttttaaaacttggctttgttgcccaatagggagaggttttatttttcttattttgaataatgacttgaattttgttaaaatgataaacaattgaagcagtaaagacaaaaattcacttaatctcaccatcagaaaaaaaaaatcattgcttaatattaagtggcattattccagacattcatgcatgtcagcagatagaaagtctgatacctagatagaaacaattcttgaaaatagcattaccatgtaattgtgttttgttaacaagcaattttatacaaattaatagaaaaagagtgaacgtgatggaaaaagcgaagggatttgtgaactttagttatatattttctcattgtaagaatattagttcttaagagatcacgtagaggaaagataaattttctatatattttattcttagcactttcacccaggctggagtgaagtggtacaatctcggctcactgcaacctctgctgccacgccactccccatccctcccccaccggttcaagcgattctactgcctcagcctcctgagtagctgggattacaggcgttcaacatcatgccccactaattttttttttttttttttttttttgtagagatggggtttcaccatgttggccaggctggtctcttaacttctgacctcagttgatctactctcctcagcttcccaaagtgctaggattacagacgtgagccagtgtgcccggccattttattcatttttaaaatacttgttttttagagcagagttagtataaccttttacgtattttcttttctatccttatcatccctgacaacttgatttttgctagttaaatggaagattttagcactcatcaccagtatgttaattgtagtacctaaagttctgaattcgttatttcagtttttctcttggttgtctgaacttttgtgatcccacaggtgctcatttctctgctttgaggcatcatttgcctttgtactagaaggatatctagtacaaaggtaaatgatacttttctaagttcatggtaatggtattggtattttgtaatggtatttttctaagttcattgtggactttgctccactattttctagtgatgagagtggcaccagttcttcagttttctcatttattttcagattttattttgttgatttagtagttacttggcaataatttttttattatctacttattgattatgcagtttcctgaaaacctggctggctctgaacattctgagggactaattttaaaaagagtcaatatatgtaatagaatgagcattgtactttgaatctcaaagtccaagtttgaattctggcttgtctcttcaggcaaattgctttaccaaggcttggtttgcttgtttataaaatataggctctattccctatcacacagtcatattataatagcatcaattaaatgaaaagatatgattaaagcccttgcacagtgagaaaataagtttaaatggtctctggtctcatttttaatcmtctgtagggctgactttttctgcagcctgcctcattttgtttgattttcttctaaaaattatctttgttattacccactttccctgcaagatgacttccttcaagaaaacaataccttctttttctttcctctttcttaagatatcactaaagaagccgaacacggtggtgcatgcctgtagtcccagctattcaggtggccaaggtgggaggattgcttgagcccaggaattcaagaccagcctgggcaatatagcgagactgacctcataaacaaaacaaaacaaaaaacaaccaaaaaaatagataccactgtgaaaggaaaataaatcccaggaggcccaaatcactaagccaagggaaaagtcaagcttggaactacatcaggcaaacctgcctcccattttattcctcaataatacagctacaaggctgggcgccatggctcatgcctctaatcccagcactttgggaggctgaggcaggcggatcacctgaggtcaggagttcgagaccagcctggccaacatggcgaaaccccatctctgctaaaaatacaaaacttagccaggcgtgatggcagacacctgtaatcccagctacttgggaagctgaggcaggagaattgctctgttctgttgaatttcaccctggcaatggaaaccgatagcttatcttcacaggtgtgggacagaaagtcatccctatgctcatctgagacaaatgcgtacctcattgcttcctctgccctatttatgtaaaaatgcagtttcactgagccagattaaattgtgtattcagtgaaaggctgatgaaggattcaaaagaatgcaaccttttgtcttttacctacttatgacctggaaccccaaccccctatcagaaccaatgacaatgttacacatactgatgtctcttatctccctaaaatatataaaagcaagctgtacccccaccaccttaggcacatgttgccaggatctcctgaggttgtgtcatggacgtgatcgtcaccttggcaaaataaactttctaaattggttgagacttgtctgacatattttgaattcacatcactaaggagatttgtattatcaggtgtatgtatatgccaataattctgtaaaagaagaattttccttacttgagatatattgtttctgtagccaaagactggagtttagttaattctggaagctttttttacttagttgaaatctgacagctagtacacagtcaatggattggtaaaactgctgccaccttagtataaaccaaggcactacctccaaaccaatacaagtaagcagtcatcgtgttctgtatcatcacctactcgcagtaaaagcatggcagtttcaccttagaagtttcttgaagtaaaacaccttagttttattatatcttgtccatgaagtcaacattgtttttctattctctgtgatgaagtgggaagtacacgtaaagcagtttctttgcatactgatggttatcttgagttaaagcactcatgcaactgagtttcaagctgaactatccacattgttcatggaacaccgtttttaattgtaagagttactgataaactatggttattcatgcttggatatttggcagacatttacttgaaaatgaacaactgtgagcctatcaattcaagaaaaagaactgcaaaataatggcgaatgataaaatttgagcttttaagtgaaaattaaaattttcgtaaactattgtctgctaccttcagtttgacaatttcttagtacttactgattggatcatggtagtattaataaatgtgattttaaaagtataatgaaataggccatttagaagatgcatatgactcaatgaaccaattttttttttttttttttttttttttttttttgattttggctgtgtcgtcaggctggagtgcagtggcgctatcttggctcactgcaacccccacctcccgggttcaagcgatcctcctgccttagcctcctgagtagctgggactacaggcatgtgccactatgcccagctaattttttgtatttttagtagagatgaggcaatatttttaatatagctaatgcatgatgttaaaaactttgcatatgkaaaagatgcattcaaaatagaagacagatcaatgaattttagtgtagtcattttaagtttagtgacatagtttcagtttccacattgcaactatacactgtggagttttagcatagtatctaagaatgaatatccacagttctgaacaggttattttagcactcttttccagcaatatatctctgagaggccatactttcttcacgtatgtcaaacaaataacatattgcaacataattgttcttcagacttgttttttagcagcagacacatttccaaatgtaatcttactctgaatctgagcttcactatacaatacagacaaaagtgagcttttccagttgaagtaggagtctgatctgaaacacacccctggccccaacaaaaacaaataaaactcccactcttattttaagagcttgttgaagagaattattaagtaaaggcccttttggccgaaactgccatcttcctgtaattcgccaaaatgacaaacacaaagggaaagaggagaggcacccagtacatgttctgtaggccttttagaaaacatggagttgttcctttggcygcatatatgcgaatctataagaaaggtgatattgtagacatcaaaggaatgggtactcttcaaaaaggaatgccccacaagtgttatcatggcaaaactggaagagtctacagtgttacccagcatgctgttggcattgttgtaaacaaacaagggcaagattcttgccaagagatttcatgtgcatattgagcacattaagcactcctaagagccaagatagcttcctgaaacatgtgaaggaaaatgatcagaaaaagaagccaaagagaaagttaacctgggttcaactgaagcactagcttgctccactcagagaagcatactttgtgagaaccaatgggaaggagtctgagctgctggaacctattccctatgaattcatggcatcataggtgttaaaaaaaataaaagacctctggactgttaaaaaaaaaaagcaaaagtcagcatgggaataaattatatataaagtgccaacagaagtatgtttatagtaagaattttttttgtttcccagctgaagatttattggcataaatgcagccatctaaaaacataagttatgaaaaacagtcatgatgtgccctccccatccccccagcccaggcccctaaaacctcctctgggggagggagggagagagagaggaagggggagccccacaaccgtctaggaatgctcagcccctgggcccgtgcagggcgggagagccgggcctcagcacatcctgtagtctgtggagcaggacaggtcgcacagatggcccctgaaatctaggttgatggtgaagtcccggtcccagttcttggcgttgggccgcatgccgatggtgccgaagatctcctcgcccgtcttcaaggtcaggtagtcctccatgtagaacaccgtctgcttccagtgcgtgtacagggactcgggtatggtggagaagccggtccctccggtcctcttgtggcagtgcgtaaactcgatgttgaagtaggccacctgggtgtgcacgtagtcattctgcttcacttgcaggcagaacggggaggtgaaggtcaggtcttccaccttgacggtgtagatgtctacctcctttatgaggcaggcgttggtaaccagctgtttgaggtccaccacatccactagggtttccttgatggccacatctttgatgcaagatatatcgaagccataaacgttctcccaccagtggatcttgtagtctttgtactgccggtcctcggtggccgtcacatacagtgtggcccgttctgggaagatgaggctattgggcgccagccacttgtccgggcatagagcacagtgttgagcatggactcgtagaagaggcagttagcccatccacttgctgatgatgatgttcaccttttccaccgggagctctatctcctccaccttccccttggtgatggtcaccaagtggtctaacttgttggctttgacaatcttcaccgcataatcagagctactggaacacwcgatgccgatgaccttgcgggcccggccttggcggcgaacatgcagaggatgcttgtgtccgagcccacatccagcaccaccttgtctttaaagaggtggcggttgtgaaacatggagttgccgaagtgggcgtaggagtcaaagtagtaatctttggacgtcatgccctcgacgttcggcttctcgctgctttccgcctggccacaggacacctccatgatgcagttcacgacctcggcggccgccatcttcacccgcacctactcctcttccggccgccaagacccccgcctttttctatagtaggattttaagaggtgaaagaagcacagtgagaacaagattaactcggatatattctttgctaaggctttactccccacttcagggtaaaacttggaattacatgtttgagtctagcatgtttgaatcatgctcatttctggcaagagcgtggctcatttctttttggcaacaaaataaaatgcctgccygtctgctgaaactactgtgttttgaaagcatttatatatttatttatttgagacaagagccttgctgtcaccctggctggagtgcagtggtgctgtcttggctcactgcaacttccgcctcccaggttcaagcaattctcctgtcttagcctcccgagtagctgggaatacaggcatgtgccaccacgcgtggctaattttttagtagatagggggtttcgccctgttggccgggctgttctctaactcctgacctcaggtgatccacctgctgcagccttccaaagtgctgggattacaggcctgaggcactgtgcccagccgaaaagttagtagttctaaaaggagggaaggaactaaccatatggagatactacttatgtgtcagacgctactaggtaatttattagctaggtgaatcttcaaacagatgtggttattgtttattagagaaaactccttaccgctgaggaaattatagctcagcaaggaaagtgaatttcccaagggcctgtggtcctagagctagaattccaacctgaacctgacgagagttaaataaagcttatgctgtttatactctggtcattatgtgtcactgataatgtttttatttagtatatcttttagtgaagagaaagaaaatatatatatatatgtgtatggatgtacacatacatgacttgcagtcttgtgatctgaatgccacatttttttattcccacaggaggcagccttctgtgctgtgattcttgccctgctgcttttcatcgtgaatgcctgaacattgatatccctgaaggaaactggtattgcaatgactgtaaagcaggcaaaaagccacactacagggagattgtctgggtaaaagttggmcgatacaggtaagcctgaagaatagcactcatctcttttaccatcctctgtttcttgagacctctcagatacaatgcttaacgtatttctaatgatctacttaattactcatggtactcctcccctcttcttcttgatttttttccttataggaagagaaacctaactttatgatttacaattataggaataatacatgttctctgtcgaaatttttttttcttttgtgtattttgtgaaaagtttttttttttttttttaaatgaaaagacagtaataatctcacaaggcaggcgcattgttaacatttcggcatatgtactcccagacgtaccaatacgcagttatgccccccaccatccaaaataactgtttttacagattatactctgttatgtgtcttgggttgtttgttttgagacagggtatcctctgtcacccagtctggagtgcagtggtgtgatcattgctcactgcaacttcaaactcctgggcttaagggatcctgccgcctcagcctcctgagtagctgagactacaggtacatgccactgcacccggccactttttcttttttaaaatattttgattgaacatcacacaccgggaactgttgtggggtggggggtggggggagggatagcattaggagatatacctaatgctaaatgacgagttaatgggtgcagcacaccaacatggcacatgtatacatatgtaacaaaccacgttgtgcacatgtaccctaaaacttaaagtataataataataaaattaaaaaatatattttgattgaatatggaaagcacaaaggatgtaacatgcatgactttaaagaatgacaaaagtggcacctgtgtatgtacctcccacttaaagaaatagaacactgttggtacttttgaggtttattccatgccctgattccattctctcctacccccagaggtaaccactgtactcaattctaggtttttcattccttcgcccttctgtgagagtttgttttctttgctgtgttttagacctttatgtaaaggaattattgttgatacattttcctgcaacttttttcattcacttttatgcccctgagattcatcatagtattgtatagtggttcattcatagttcactgttcctttatgtagtcacataatgtctagttcacttatccattttcctgtttggactgtgaacatttggtcagtttttcttggtttatatacttgggaccttgaatataagtatatacttatatacaagtatatatttggtttatatacttagggccttctctagggcattctctggagtaaagtaggtagatagaggtttccagctttaataggtagtgccaaattgtctccctaaagtggctgtatagtaatttacattctttgattttgtttgtatgtgtttgtgttttgatttcttggtgctgttctcccatattcctactaattattgaaggtttcctttttaaagaccaaattgtattttattttgtatagtgtaccatggataatactattattttcttgatgttgagcatttatactttttccagtttttccttcttataatgcttcagtgaatgttattgtcataactctctgttcctatatcattatttcctttaagtagaatccttgaagtagaataattgagtctaagggagtgcgcgcctgtgtgggaatgtgggcagatgttttccagcttctagcacatacgacttgtttgtgttctagttaggttgtaagaatgccgtaagatggactttaatgtggacagacagacattgctaatccttacttttatatgagtaggttattttcctaatgccttgcagccttctagaggttttccttctccttttcacctttcccaggtggtggccagctgagatctgccatcctcgagctgttccttccaacattgataagatgagacatgatgtggkagagttcccagtcctcttttttggatctaatgactatttgtggactcaccaggcccgagtcttcccttacatggagggtgacgtgagcagcaaggataagatgggcaaaggagtggatgggacatataaaaaaggtaactttatcctttttgtttctcaggcaaacacagacctctgttacctgagtgtctgatctgttttagaattcacatatgctccattttgaaactgcctttgtcctctcagggcattatctggctgcaaatacagtattttgcaaggaagttgacccatgtaactcattatttttgagccttaacctttacttaatttgaatttccttgagcttktttttgacttatcagttgttttgtcagcattccatcaaataatggagttctgaaactatttcatagaagaaacacttcagtttgctagacagaggctcagatctctagcagagctacatttgctccaaggagtcttgtcttgtcttgtcttgtcttgtcttgtcttgtcttbagctcgttgggaagaagtaaaattcaccagatattgtagaacaaactagtaaaggtcaaagcataaatgctctgaatcaaaataaagttttgtaaactggcctagcaatgaaggcagggtgccctgttataagcagaactagttttactgcttaccaggtggtccaatcaacttcgaacccggttttctcttaccatgtaatggagaaagtttgctcttagaatacagtgggattataaaaagtgtccctgcagagtacataattggtatccccttagtggtaattaccttcttcctctagctgtcctttgaaagataatatatcccttgctatttaatttatttggtacttaaagtacaaatggttcccaactcagaatggtccaacttacagctttatgatgatgcacttccattatgttcctcagcttatgatgggattacatccaggtaaaccaattgttaacatgaggagcatctgtgtaagactttgtctatagggtgagatgaaaagggattctaagcaagtgacatggaagaagattctaagcaggtaaaacttcctggttagggaatgggagtaatgtcgatagggaacaagtttaacaaaggttctgtttgccacatgttattttagtagctcctcacttacyctgtttgtcttgtggtttctgtacatagatatgggctgtctatcagttctactgctaatacaaaaatacatagtactgtgctgttagtactaatacttcaggagctggggtcttgagtcttgtaatctcaggtggtcagggataaagtcgccagtattttggcctgcacagagctggccaccactgagactgggggagaaggcggagtataaggaataccgcaggtctgagcctgcctaagctctgagattctgccttaatcagggggtttctaggtgcctctgacttcttcgagcttgtatttttgcaggagaatctgaaatagataccagcagtcgaaatacctgccgggattttggtattattaatattgtggcagaagtgtgtattgtatatgctgtgggaacagagcaagaagaagctggggagcaatgtttggaagtcatgaatgattactaagtgactttgaggaatgaatcataataataatagttagcatttttgtttgccagaccctgttctgtgtttattttctgctttaagtgcttatgataaccctatgaggtggataccatcctgatcttgcagatgaggaaactgaggcacattaatgttaaagtactcgcctaacatatcagtaccagtaagtgatagaggaatgtttctgactcttatagtagggccagaatctaacctctacactgactttgaagaaggaaaaggacttaaaatgtgatacattttaccaagaaggcatcacatgtgaaagcacgtgttgaatctattaataaaatcctgagttagcaacctccaagtatttggtacagtttaagcacatggttgggggagtgttgggctattttcctgaaaggatgaagatctaactagatccctagttagagcagagttttagaaactttagcctgggacattgttgggaccattaaaaggtgagaggctgcaagtgggaaaatcagtgagatggctgttttaagtagtttggggcagaaatgacgagactctgctggacacagtggctaaagcctgtaatcccagcactatggggtcaggagtttgagaccagcctagccaacacattgaaaccctgtctctactaaaaataaaaaaaaattagctgggcatggtgatgtgcgcctgtaatcccagctactcgggaggctgagggaggaaaatcgctggaacccgggaggcagaggctaatgccactgcactccagcctgggtgacagagcaagcgagactctgtgtgtccacccacccctccccgcccgccccaccaccatcaccaccaaaaaagaaagaaagaaagaatgagactaatggtgaattgttcatggggatggagaatatgatttatattggatagatgttaaggaggtagactaggacatgnnnnnnnnnnnnnnnnnnnnnnnnnnnnnnnnnnnnnnnnnnnnnnnnnnnnnnnnnnnnnnnnnnnnnnnnnnnnnnnnnnnnnnnnnnnnnnnnnnnnnnnnnnnnnnnnnnnnnnnnnnnnnnnnnnnnnnnnnnnnnnnnnnnnnnnnnnnnnnnnnnnnnnnnnnnnnnnnnnnnnnnnnnnnnnnnnnnnnnnnnnnnnnnnnnnnnnnnnnnnnnnnnnnnnnnnnnnnnnnnnnnnnnnnnnnnnnnnnnnnnnnnnnnnnnnnnnnnnnnnnnnnnnnnnnnnnnnnnnnnnnnnnnnnnnnnnnnnnnnnnnnnnnnnnnnnnnnnnnnnnnnnnnnnnnnnnnnnnnnnnnnnnnnnnnnnnnnnnnnnnnnnnnnnnnntgtctgtacaaaaaaattagcctggcatggtggtgcatgcctgtagtcacagctacttgggaggctgaggtgggaggatcacttgagcccataaggtcgargctgcagtgagctgtgattgctccattgcactccaaccagagtgttagagtgagaccctgtctcaaaaaaaataaagtacggtacttgagtgtagattagctatgaagatctgtgtatcattagagctaatagtttatatttacacaacaagtcttaggataagaggcaagaaggagaacaaagcttcaactttgactttctgccagaggagagtgagcacaatatctggggcacctaagatgtagcatgtttccgaaagtgggaggtttaggactgaggcaagaaaggcttaaaggcagtgactttgctaagcagatgaagcgtagttgttaggagatggcatctgtgggctttctaaagtcatttagttgtttattgttttctcatctaacgcacagttgtctaatcttttggcttccctgggccacactggaagaagaattgtcttggaccaaacataaaatacactaacagtaacaataactgatgagctaaaaaaaaaaaaaaaaaaaaaagtccatgcataatttttatgatatccgccaccacagataagcaaaaaagttctcgtattcagatggatggatgccagtgatctaaagggtgatagtctgtattgtgccatttagttctggattatgttttgtcttaatactatgtctgaataccctttggactacattacctgtttgaaaatagctgttatgtgttttctttttcatatagcattggtcgatttttgtgtaaaacatggagtttctccaacttaaaggggaaaaagtaaaaaataagtgaataaataagtaattccacccagagattttgaagtgacttgtgctgtctgttttcatagctcttcaggaagctgcagcaaggtttgaggaattaaaggcccaaaaagagctaagacagctgcaggaagaccgaaagaatgacaagaagccaccaccttataaacatataaaggtgaggagaaaatcttgggggaccttctctagaagagaaatggaatagctggctcttcccactctgttcatgacaagaacggaagcacaagcatagttcrttttaggtagaggtatgagcttaaaagaagatcagaaatagccgggcacggtggctcacgcttgtaatcccagcactttgggaggccgaggcgggcggatcacctgaagtcaggagtttgagaccagcctggccaggcaggtgcctgtaattccagctacttgggaggctgaggctggagaattgcttgaacccgggaggcagaggttgcagtgagccgagatcgtgccactacactcaagcctgggcgacagagtaagactccgtctccaaaaaaaagaagaaaaaaagaaacaagtaccagaacaccattcctagcgcattgccaggattcccagtgtcaggagaattgattttaggtggacctaacctttaacctacctagtgaaatagtcatcaccattatcatctgggtccagtggagcctttgtattttaaacatttttatgtcatttatatgaataattgacagacataaaaataaagagacagtggagaacaaatgtattagaaattttagtgttatgttgttgctaaaataattgcagttttatcattacttttaatggcaaacctcaattacttttgcaccaacctaatatttactaaatcctttttacaaacctctttttatcagataagttagttgcgatgctcaaatatcataaaacatgaaagaatattgttaggcctgttgagaaaaggagattacccaggttgttcttgtaaaacatctttgatggcattgttcctggatgagaataccctatttcttttttgttcttagaaatgcattatttgttcacttatcctttgtgtgtgtgtgtgtgtgtgtgtgtgtgtgttgtttttttgtttgtttgtttttgagatggagtctccccctgtctcctaggctggagtgcagtggtgcaatcttggctcactgcaacatccatctcccaggttcaagcaagtcttctgccgcagcctcccgagtagctgggattacaggcgcacaccactatatgcggctaatttttgtatttttagtagagacggggtttcgccgtgttggccaggctggtctcgaactcctgacctcaagtgattcacccgccacagcctcccaaagtgctgggattacaggcatgagccaccacgcccggctgtgtgtttccaaagactgataatctgagatgctacttggagactaatttgaccaccatcttgagaatctagtatgtttaagtttgtctcaaatattggatcgagcatagttaaactgaaaaactttcgttgtttgtcagaaattcagattgaactagatgacttggatttttatttgctaaatctgataaccctaccgaaatcagaccttcaagatcgtgtctccagtgttttatacttgcttttttatttttaaactcctttcctcaggtgtagtagacggtcttttatactttttttaaaygacaatgcagtactttgggtaatgccgtaagaaatctaaagtgtgacagtttcagtatttcatcgtgcttatatgtgattccattgtgcttcccttgtcttttttttttttttttttttttttttttgagatggagtcgcccaggatggagtgcagtggcacgatcttggctcactgcaagctctgcctcccgggttcaagccattctcctgcctcagcctcccgagtagctgggactacaggcgcccgccaccacaccgggctaattttttgtatttttagtagagatggggtttcaccatgttagccaggatggtctcgatctcctgacctcgtgatcggcctgccttagcctcccaaagtgctgggattacaggcgtgagccactgcgcccggcctcccttttcttaytatttctgtcttctttagcatagttgtgaattattgatgagttagtaataatgtgtaatgatgaattagtaagttgttacaagatakaggaaaagtaagaacactaaaattccataccgtgtcttagatttagtctgatggacttacatggtatttacaagacagaatcagttttgttctttgtttgttcctttgagacagggtctccctctgtgacccaggctagagtgcattgctgcaattttggctcactgcaacctccgcttcgtgggcgcaagtgattctcctgcctcctgcctcagtctcctaagtagctgggattacagacatgagccaccaacgcctggctaattttggtattttttgtagagttggggtttcaccatgttgcccaggctggtcctgaactcctcagctcaaagcaatccacccacctcaacctcccaaagaactgggattacaggcgtgagctacgacacttggcctgaattttattcttttaaataagtatattttctttttgaactttggaagacctctaaaaagggataaaagtcataaacactgcttctgaagtctttttttttttttccccctgagacagagtctcactctgttgcccaggctggggtgcagtggcgtggtctcagctcactgcaacctccatctcctggattcagcccactctcctgcctcagcctcctgagtagctgggactacaggcattgtgccaccacacctggctaatttttgtgtttttagtagagatggggtttcaccatgttagccaggctggtcttgaactcctgacctcaggtgatctgcccgcctcggtctcccaaagttgagcctcccacggtgagccactgtgccaggcccagttttttttgcttttttctccccccctttattagagatgatgatttcactatgttgcctaggccgatctcctggcctcaggttgtcttcccacgttggcctcccaaattactgggattataggcatgagctgccactcctggcctttaaattgttactttaaatgtcataaaatatccataccaagattagattaaaaaaagaacaaaacgaaaaaagtcataaactgttaatccttacaaatgattacaacttctgaaattaagaatttcaaaacctataattggatctaaatgagtctcacaatgtatgtgaaaatatattcttggaacatagtcgttaggcctcagaaatggaaaataattctattcacatagtcctgagggtcagataacagcaaggtaggcattttagagttaacatattaaccatattgagctactgagagagcagtttcctgtgagtgatctcatcaagaacttagaggccaacttctttactccatttttttttttttttttaataaacatttccaggaaaaggatctagagcaggcattggcaaactatggttcatgggcaaatgtggtctactgcctattcttgtaatactcttgaactacaggttgtttttgtattttttagtgattggcaaaaaagagattttgtgacacataaagatgatatgaaattcaactttcaatcagtatccagaaaattttattggaatacaggcatgcttcttcatttacatattacatatggctgcttttatattacagtggcagagtcgagctacatgtggagatctatggcctgcaaagcctgaagtrtttactttctgaccctttacagaaaaagttacttaactcctgatctatagtgagatttacttagaattacatatccatgtctttgttcttaaccatgtgggatttgttttggtttgcttttggtttacgatgtgataagtacaaaacttatttttggattaataacaggttagatcagttgataagaaacaatgattaaaacatawattttccagcctgggcaacatagcaaaacccagtctctacaaaaaatacaaagaaaaaaaaaaatttggggtgcctgttgtcccagctacctgaatcacctgagcctggaaagtcaacgctgcagtgagctgtgattgcactactgcactccagtctgggggacagagtaagaccctgtctcaaaacaaaaacaaatatatatttgtagagagaaaagaagtagcatgaacctttatgtgtatttgggaagggttcaagtaaaaatatttcgaatcagaagtgaatgttcaaatgccctattcaggacttgtagtcttgggtgactgagattagctgttgttgtctgtccccttagaatttgccttagacattgtaagccttatgccttatggcttccagttgcatgtgttggggatatttctccattagcaagaagtttccaaaccttaccagtgttttgatgaatctaggaacagatctggcagtgagacctacatccattttccccacggacagcatcttgctggagtgtcttgcaggtctatacgatcctcccactgcagcttcctgagtagctggracctcaagcacttgccaccatgcccggctaagctttataatttttttgtagacatagggtttcattgtgttgcctggtctggtcttgaacttctgggctcaaacaatcctccagtctcagcctccgaaagtgctgggattacagatgtgagccactgcacctggcctcctcctgttaaatgttgatagaaaaatggtttgatggcagcatatatccagattgtagatttcataatattaaaggggagtgggcaaataataaaatgcaagaaatgaaagcatttgaaaatttagaggacagaaatgacttttaagtaagtgattttaggtgtactggaatgagtaatctagaatatttgatatgagagaaacaatcataagggcattatataagaaaggaagaaagaatttaatatgtctaccatgtttaagaggcagctaggtgctgtactatacatatatttcttattcttacaatagtcttgcaagtaatttattcaaaatcacacagttcctgaacagtcaaaattttttgtgcggtttgtgtcttagaagactaaatttgactgttcccactgaaataatatgaaatgaggggagatacattctcatgcacaaatccattattgtactggaacatctattgtctttccttattgttgctagtatttgttaaaacctctacattaatggctttggtgtcacaataactgtttgaccttcatgttttaactcaccaaactttcactgtgtttttgagcactagcaccacttctaaattaatccatgagtgacattgctatagtccttttaaaagattttaaattataagctgggtgtggtgatacctgcctgtagtcccaactacttgtgaggctgatgcaggaagcatagaggaactcaaattacacacagatgatttcatgccatttatttgccacttaagaacagtgcttttgccaggtgtggtggctcacacctataatcccagcactttcagagaccgaggcgggcagatcacctgaggtcaggagatcacaaggtcaggagatcgagaccagcctggccaacatagtgaaactccatctttcctaaaaatacaaaaattagccgggcttggtggtgtgtgcctatagtcccagctacctgggaggctgaggcagtagaatggctagaacccaggaggcagaggttgcagtcagccaagatcccgccactgcactgcagcctgggcaacagagctagactccctctcaaaaaaaggaaggaagaataatgcctatttttttgtagcagcaaatgtgacaccaacatgtggcaatagcagannnnnnnnnnnnnnnnnnnnnnnnnnnnnnnnnnnnnnnnnnnnnnnnnnnnnnnnnnnnnnnnnnnnnnnnnnnnnnnnnnnnnnnnnnnnnnnnnnnnnnnnnnnnnnnnnnnnnnnnnnnnnnnnnnnnnnnnnnnnnnnnnnnnnnnnnnnnnnnnnnnnnnnnnnnnnnnnnnnnnnnnnnnnnnnnnnnnnnnnnnnnnnnnctgggactacaggtgcccgccaccacgcctggctaatttttttgtatttttagtagagacggggtttcaccgtgttagccaggatggtcttgatttcctgacctcgtgatccacctgcctcggcctcccaaagtgctgggattacaggtgtgagccaccaggcgcggctgaaattattttttaaaatgaatttcaaaaaaatttttaaagttcatattttattttattttattttattttattttattttattttttgtgaccgagagaccgagtctcactctgttgcccaggctggagtgcagtggcacgacctaggctcactgcaagctcagcctcccaagtagctgggactacaggcgcccaccaccacacctgtctaattttttgtatttttagtagagacggggtttcaccgtgttagccaggatggtctcaatctcctgacctcgtaatccacctgcctcggcctcccaaagtgctgggattacaggcgtgagccaccgtacctggctcgtattttatttttttgagatggaatctcaacatatcggccaggctggagtgcagtggtgaaatcttgtctcactgcaacctccgcctcctgggttcaagcaattcttgtggagttcatattttgtatgtcaagtgaggctctgtttttatatgaaactaagtgttgatagttcaaaatcatgggaaatgtggctgcaacttcaaggaaaaaaagtttgcctttttcaggacgtgaattgtcttctgctgacttgttttatgcggtgtactttgtgttacttttccaggtaaaccgtcctattggcagggtacagatcttcactgcagacttatctgaaataccccgttgcaactgtaaagctactgatgagaacccctgtgggatagactctgaatgcatcaaccgcatgctgctctatgagtgccaccccacagtgygtcctgccggagggcgctgtcaaaaccagtgcttttccaagcgccaatatccagaggttgaaattttccgcacattacagcggggttggggtctacggacaaaaacagatattaaaaaggttagaaaaagctaaattaccatatactttctcctctttgcagttgcttgatatcattgatccttgacattagaaaattcatcatagaagaaaataacacagttaataattaaccttattgttgtgtcttgccatatccttctaccgtttagaggcttacgaatggatggttttgatctcccaagtcctttgtattgatcatggtcactgtgtaggaggttggaaaaaatgggacattcatagagatgctatggctttgtttgcttttttgtgaatatcctacagctggtaattaagagagatgacagtgagcacatgatacagagacattgatccacctactaataaaacatttttagtgaggaaaaaacaggtctggcttcatgaaacatgaaggataagaaggttaagccttattggatgaaaatgcagtcatgtcttcaacttaaaacttggcaggatctctaagtttctaataaataaataatattgtatagtctttttttttttttttaataaaataagccttattctggttacattttctgaagaattttattggtttccaggaaatgtagtgtatatgggttggcgtttagtcatttgctaagtagttatttttatatttactgtatgtgccaggtattgtgctggggatgcactaaccaagacgagagatatggcctatactttcataaaatttacatttcggagggagagaaatattgaacaaatcatctcccagtgtgaaagtataaagggctctagagatgtgtgacaaaggaactgaaactagtttgtctctgatgatattatattttattttatttattttttgagagagggtctcactctgtcgcccaaactggagcgcactggtgccatctccgctcactgcaaccttcaacttccaggctcaagtgatcctcccatctcagcctcctgagtagcagggactacaggctcgcatcaccacgcctggctaatttttgtattttttgtggaggtgaggtctaaccatgttgcccaggctggacttaaactcctgggctcaaattatcctcccagagtgttgggtttacaggcatgagccatcactcttgacttgtgaggctattttaaattgagacttgaaatataagtagctgttgacccaggcaaggtgcattaaagccctgcaggttaggagtgaacacgtgtgaaaagccagagtgactgtagcataatgaatagggaggatggtactttgaaatatagagcagagcaagcaccaaggaagatgaacatagtttatttggggaagccaattctcgggctctggggcaggtagagattggccatccatctctctttataaggacgctctagtttacttactaatcttccattctggaggatctttagtatccagtgtatcctaatctttctgctgctgacagtggtaggagtaaggaggtgtttctcattatcaaatagttggggatcgtaaagtaattatrtgtgcctaaaattatactcatgtaatctgctttgtagaatgtgatgttttcattaattttttaaaaaaatgtatacatttggataccagtgtccttttttgccattaagtcaggaggtatttcttgttctagggtgaatttgtgaatgagtatgtgggtgagcttatagatgaagaagaatgcagagctcgaattcgctatgctcaagaacatgatatcactaatttctatatgctcaccctagacaaagtaagtaatgggaaatgctgttttcactgttacaagattgtaaatttgtgttgtcccagccatagtatttgtaggcatgtaacgcagttcccaaggtagggtcttttcccatacccattgggattgctggattggggttctggagtaggtaagagtgctcattttctgggtattcatggccagaggcaatacagcagcttttagcattgtttttgaacaattcaatgaaaattggagcttatatctttgagtattttttctacaggattacaagtttgaactcagaaaagtacataattcttttttattttattttacagttgagaaaattgttaaatatttaattattttactgataagattatgtaaatttttttttaaaattattttgagacagagtctcgttctgtcacccaggctggagtacagtggcatgatctcggcttgctgcaacctctgcctcctgggttcaagcgattcttstgcctcagcctcccaagtagctgggactacaggcatccgccaccacgcccggctaatttttgtatttttagtagagacaaagtttcaccatgttggccaggctggtctcaaactcctgacctcaggtgatctgcctgcctcggactcccaaagtgctgggattacaggcatgagccaccgcacctggccttagtttttataataaaaccctttcttggtatttacctttgtaaacatttctcaaattgtgcactaggatttgtgagatcttcacttccagatattctgatcttactttgggattgggactccgcattagtatttaaatctccttaggtgatttctaatgtgcatctgggttgaaactacctaaatagaaagtgggacaagctgctatttgtagggcagtggtcctcaaacttcaatgtagtcagaaacccctggcagccttgttatatataacgcagaatgctgcaccccagagtctctgctttagtgtatttgaagcacaacccaggaatttgcatgtctaacaaattgccaaatggtgatggtgctggkccagggatcacactttgagaaccaaagttctttgggatcttttctctgagaggttcartctttacaaatagaaactccaacttattagagagaatagtcaaattttaatccacagcagaggtctcaggaagtctgatgtgtagcttcttttggaattctaggaccraatcattgatgctggtcccaaaggaaactatgctcggttcatgaatcattgctgccagcccaactgtgaaacacagaagtggtctgtgaatggagatacccgtgtaggcctttttgcactaagtgacattaaagcaggtaagaatcatttcaggattctgcagctgacatctgaatttcagggcttttgttttttacaaacagcttcctcagattataattttaaacatttctatatgtaccgttctctggaattaagttcatttacatttttgtgcaaccatcaccaccatccgtctccagaactcttttcatcttcccctgctaaaactctatacctactaaacactaagtccccattcttctttttcttcacagcccctggcaactaccattctactttctgtctctgaatttgactactatatgtacttcatataaatggacaatatttgtccttttctgaccacctcatttcattcattcattgattcatttttaatgtttagggacagagcattgctctgttgcccaggctgcactacagtggcaccatcacagttcactgcagcctcaaactgggctcaagcaatcctgctgcctcagcctcctgagtagctagggctataggcacatgtccccattcccaggttttttgttttttgttttttttttgtagagacggagtcttgccgctatgttgccaaggctggtctggaactcctgggctcaagtgatcctcctgcctcagcctcccaagtgctgggattacaggcatgagccacctcgcttagcttggctcatttcttttagcacagtgtcttcggaacatggatggttttaatggaacaaattttcacattcatatgaacttaccactaataggtttgctttagaaactactagctcttcagtctcctttctcaccttcctgaagttgctcttcttccactttataaaccaaagattgatctctcactcttccatatcttatgggttatggacccaaggctattttaaaaataaaccactgggtgtggtggtatatgcctgtagtctcggttattcaggaggctgaggccagaaatcgcttgagttcaggagtttgagaagcagcctgggtagtatcgtgagaactctgactcttaaaaacacacacacaaaacaacaaaaacctctcaacctctaggatgtcaaagaacaggatctttggagaattcactgctctgtcatggctcacctgggtgcttgtctctctaacggggtagcgagatggttgtaaccaggacaaatagtaagaagctaatttgaatcgaaagtaaatctggtatggctgagtggtttgacagtaaagttatgtggtagatattttccataaattaaaggatcttaatctatagcttcaaggttttgatacaattattttaaacatatatacctatgcatgtaacaccctccaaattgcatgcttttttaagtattaaaatttgtggctgggcgcgatggttcacgcctgtaatcccagcactttgggaggccaacacgggcagatcacgaggtcaggagatcgagaccatcctggctaacatggtgaaaccccatctctactgaaaatacaaaaaaattagccggacgtggtggcaggcgcctgtagtctcagctactctggaggctgaggcaggagaatggcgtgaacccaggaggcagagcttgtagtgagccgagatcgtgccactgcactctagcccgggcaacagagggagattccatctcaaaaaaaaaaaaaaaaaaaaaaaatttgtataaacgttgtacattttgaaatgtacaagaaagttatgatttttcaaatgtagttttgcaaggatatgagcaaaacagttaaaatcagcctcttatactcaaactgggatagaactggcctaggtagtctgtaatatacagtaatatagtctaattactgttgaagcagaatcccatttgaatgttctggaagaccttagttctcctttgctcagtcactgttgtcctcaggaagcattgatcaagataaaagaattagaatgatatttgttcagatcttagtctgtttttgtgtgtgtttgtttgcttgcttgtttgttgaaacggagtctcgctctgttgcccaggctggagtgcagtggcatgatctcggctcactgcaacctccacctcgcgggttcaagcaattctcctgcctcagcctcctaagcagctgggattacaggcatccaccaccatgcccggctattttttggtatttttagtagagactcctgacctcaagtgatccgcctacctcggcctcccaaagtgctagaattacaggcatgagccaccgcgcccggcctgtgttttaaatttaatctatgggacttctcacactcagtgtacttttttctctacaatttaaatgtgttgtccaggagtctttcagactttttaggttgtgacaatttttagattttaaaatttgagccactagttactttcgggttttgcgtttgtttctcataatgttttacatgatgacaccaaggacacttgagcatcactgtgcactgcactctgcttatttgagactggtttttagttgcagatttatttcaagtttttggaatgggtggtttcagagtatattgtttagatttctactttgtaacaggagtaattcaataaatgatacggaataccagatacgattctaagcatattatctcatttaagccttgcaaaagtgctgtaaagtagatgatattatacctatgttacttttatccttggatgtcacacctctctcattcttttctccctttttctctctaatcgccccaggggtggagaggttcctctatattaaatcaatataaatatagttcctctataataaatcagtcacatgatttagttctactatgtctgctgagtgctgatagtcccattcttctacttagaacctgcagttcatgtccatggggatgccctcctctgccatgtctagccacaaatttctcttctttttttcctgtgttcatcagctcaggtagcttggtgttgaaattctcagactcttcctctcctcacttgactttcagtctgcataggttcaggatggggaaaatgagacaggatgtgctaagggacaggcagagtgcctatcagagctgaggccttcattcaacttcctgggcccttcacatacctgcaacttactgtctcccaagtgtcccatccctactcttgtttatctcttctctcatgctctttgccatgcccagtaactgaagatccatcaatgattgctgcatattgaactcttttctagaatggtatcactgtttagtttatgagcactgatactttctgatttaatttagcctctctgtgattacacttacatagtatatgttcagtgagcagcaagttatgacaagtatcctgctttcttttatttgtgtataaggtacagttgtattataagcacatcgtatctataaaattttagttatctatccataaatcttttattaagaaaaagacagtgtggggctgggcgcagtggctcacgcctataatcccaacactttgggaggccaaggtgggaggatcacttcaggagtttgagaccagcatggctaacatggtgaaacaccgtctctactaaaaatacaaaaactagctgggcgtggtggcaggcgcctgtaatcccagctactcaggaggctgaagcaggagaatagcttgaacccaggaggcrgaggctgcagtgagccgggatctcaccaccttactccagcctgggcaacagagtgagactccgtctcaaagaaagaaaaagaaaaaagaaaaaaaaacagtgtgaatagaaccacgaaagattcaatccagttaagttcaggcatgagatgggaaacatgaccctcccgttaacattggtgagtctcactcagttcctgcaagctccttatggcatgagcctcatcaggccgtggataattctgctactcctacagcatgaccctaacgtagctgctggtattgtgaacatacttgataaagaaatagtgataagaatgatttcctttaacattcgatgaaaaactatgtatagcagtctcastgataaaaggcatgtcagtctgcaaagggaaatcttcctaagaattgacagtttttaatatgaatgatggttaccttatacattaactgtaaacattacccctgtgataggcaacctcttcacatatttatgtaaaattcttatatttggtaggcctcccataactggcttttagttatgagttttgagtttgaatgtttatttcctctcacagttttggtgaaatggacctttgacagaaagagagaaagaggacagtttgcctgttaatttgagtacctttttttaaagtttacacgttactgctatgtgcattttgtcatattgtctcaataagcttgtcagatttctccattttaaaatgggctgctcaggattcagattaccctgctaagtctgtgacgtagctggatctacaaccagtctgtaatctacagatttctagtgttattctgtactgagatgcctctccagagtgctgccaggtaacatgtgttcacctgagaacagacaaacaggttttcctcatacttgtattcccagggcctgacacattgataagttgttttttgtttgttttggtaatgaattaacatattttgaatctgaatggttaataaacaaatgaaaaacaacttgaggtaattaacacctctggaggaagagttatcttaaatattacttgttaagccatttaagttttctctgttaaattgtattacctgattattaatgttataagattagaattaattaaaatataggattagagctaaattctttttaaaattaatctgttctcttgggagttggtatcctttgtaattaatacagaaataatgtaattaaaaccatagatattaatattttcacggtctcttatgcaggcactgaacttaccttcaactacaacctagaatgtcttgggaatggaaagactgtttgcaaatgtggagccccgaactgcagtggcttcttgggtgtaaggccaaaggtaccacccttctagacttctgctttgggattagtggtgcggtcctccctccctaacagtgttagggcagtctacattttaagaagaaatctctttgaaattaatgacattcagccaggcatggtggctcatgcctgtaatcccagcactttgggaggctgaggtgggcggatcacctgaggtcaggagttcgagaccagcctggccaacatgatgaaaccccatctctaataagaatagaaaaattagctgggccgtggtggcatgtgcttgtagtcccagctactcaggaggctgaggcaggagaatcccttgaacccaggaggcagagattgcagtgagctgagatcacaccactgcactctagcctgggcaacacagcaagactccttctcaaaaaaaaaaagaaaaattcaatgacattgaataggtgttgatagggccacttgcaattcactaagcattcggctgatcaattatataagaggtttttggggatattgttgaagtgttttgggccatctgactttaattggtgctacttttctaactaataatgctgtgaaataggaccttataaagaaggttagttacctccctcgtcttgatctcacatctcctaataagccatatagattcttggtatatctgtgtctgtccctgtctttctctcactttctctttctgaagataccaaaaaatctgcagtttaagcttctaaatgtagcataacatcatagataaaagtagaactcttaatctcaccattataaaaaagtataagcattgttgtgtcttcctgtttttttagtatgcactttctgaataattgaattctaattctgtaactgttaagtatcatttccatgtctatattctccttattttttttgttgttgttgttttgtgtttttttttttgaggtggagtctcgctctgttgcccaggctggagtgcagtggcgcaatctcggctcactgcaagctccgtctcccgggttcacgccattctcctgcctcagcctcctgagtagctggaactacaggcgccygccaccatgcccggctaattttttatatttttagtagaaacagggtttcactgttgttagccaggttggtctcgatctcctgacctcgtgatccgcccgcctyagcctcccaaagtgctgggattacaggcgtgagccacyrygcccggcccttatattattattttttaaagtccttgctgatcatttttagtgactgtcttaatttttttatataatggatggacatactagatgaacatctggataattcaagatttctgtatcataagtaacagcacagtgaaaattgcagtttaattttgatacaaaataaactatatagtgacttcaattgagtatgttccatatgcctttttgattgtgaagctcaacattaagaactgaaaaatgcaaattaacatagaagccaataagaaaagagtaaataaatttttttttttttttttgagacggagtctcgctctgttgcccaggctgaagtgcaatggtatgatctcggctcactgtaacctccgtctcccaggttcaagtgattctcctgcctcagcctcccaggtagctgggattacaggcccctgccaccacacctggctaattttttgtatttttagtggagatggggtttccccatgttggccaggctggtctcaaactcctgacctcaggtgatccacctgcctcagcctcccaaagtgctgggattacaggcgtgagccactgcgcctggccagaaatgaagagcactcaatgatcattttttaatcttgttaaataaggagaatcacctctatattatactggattttattgtgctttttgtttagttttgttggtttaacggtgttgttccttaagatgttgacttgtttcctataaattaaaatagtaactcagtttaacctgtacttaatggtattaagtgtagtgcggatgtcagtttcagcatccttgatgtctgcatgggatagcatttcacaggagtcagtcagaggtagatgctagagaggtcactgtgtgctcttagtagatactggtctgtcagaatagggtggacctccattaagccttacagattggtcctggatgtttctgggttaaaatgaagaatgtgataagatgatttggtgaccaagtgtgggctgcagggaacaaagagagaacatctgctggctgctccagggtctgccttgggagtggtggacctgaagctaatttgacttgatgtgtagtcttattgacggcagggaccatgaattaacttttttgtgtcttaacacattgcttatagtaagttcagttatgctttgttgaatgaacgagaaataggcatgtgtacccacacacagaagtctagtttagttctgaaagtagacgaatataraagtgaaactttggccaggtgcggtggctcacgcctgtaatcctagcactttaggaggccaaagcgggtgggtcacaaggtcaggagttcgagaccagcttaaccaatatgctgaaaacccgtctctactaaaaatacaaaaattagccaggagtggtggtgggcgcctgtaatcccagctactcaggaggctgaggcaggagaattgcttgaacccagcaggcggaggttgcagtgagccgagatcgcgccactgcactccagcctgggcaacacagcaagactccgtcttgaaaaataaataaattaattaactaataaaacttatgaaaggcatgtcatttaacaccagccttatggatcagcaaaaacacaaagatttttgtcttctgttttgttcaggtggcaggagtagttgatacaaaaattattgctacgtatctgtgatgtaccaggtacctttcctgcattttatcttcatgacaatctcttttcccagagaagagaatgaggctcagagagggtagttaacccrgttaagattggtactaatgtgttcacagaatgctgactgttcaatatctgacctgtagaatcaacccattgccacggaagaaaagtcaaagaaattcaagaagaagcaacagggaaagcgcaggacccagggtgaaatcacaaaggagcgagaagatgagtgttttagttgtggggatgctggccagctcgtctcctgcaagaaaccaggctgcccaaaagtttaccacgcagactgtctcaatctgaccaagcgaccagcaggttggtgccaaaatccatttgtaccgctactcgttctctccatcatactcagggtctcatgccatttgcatcagccttgaagaaagtgccatttggtctttccatgcataattttgaggggtatggtctattttcttattttggaaataatgaaagcaaaggcttagaattcttagttatgaagaatgggacagcrgtgcacttgctgtgtttcaggtcctttacttacagtcatgtttatttcattcccccagcagcccataatggttggttttcttccataatgcatgtgaagaaacagagtgaggattggggaggtgatctttcacacatagatagagkagctggattgagagctgggtttttgactccaagactattaaatcatgttgcctttctagagaaagaaagattgagatagtaaagcctttaggtggttctagtcagtgagagatggattgccacccttttagcacttcctaccttgctcccctacgcctagtgcagtctccccccatgcagagtagacttttttcctctaaaggagatttggttgtatcagttaatacatgagaaagctgctcaggtggatgtggtacccaggaaatttgtagttgaagaaattgagaacctttgagtagtgatttggggttagagaattttagggatttggatatgccatctattttaatgaacaaaaaagagaaaccagtagggagccattccagggtgaggagattatacattactagtgacctgcttccaagagttgcagaacgttaagaactttagggtataagtaaaaggaatttgtccccaaattggctttccttcactgtatattggccagggtcatgaaataaaagaaactgaggtaggatgagggcaaggccatcacattgacctgtcagcaccaggaagtagaattgtttcagaatcaactgctcagggtcgtcactggcgcaggctatgatagaaccaatcttgcctgtgtgccaggagtgggagctggtgtagttgatttgaaggtggaaacactgtccctggtcaagaccctcaggtttcatgaaatgtggggaggcaggtaaaagcttaggtcagctttgggtcttttctactgattccatgtgaacaacatataacgtgctgtgctgatctcaagacttaaaatagagcaaaggtaaatcttccatttttcatgattttatatcttttctattactgttaatagcaaataagcaggaatctaaatcaccaggatatttctctttgagttgcttatttaaaagctgtatagtacaaatggagattgcaaaaatataaaagtaatatcttaagtttcatgtaaaagaaactttttgttgtccccacccccgcccccccctcacctccttgctggaaatagtcatagaaataccaatttactcttctgcttgtatatttagttgatagtagttgctatttgataattcgctgttactttatgtattctgtgcacaaaaagaagctggaattctggggcaagaggtggctggtgagtggcataagctctctgaagcagggacagtgtgaaggaaggtcatcatccacaccttcggactgtagcrtagccttggcccatgtgatatgtatctcttttttcctaaacttttgatttacttctgtgttttcagggaaatgggaatgtccgtggcatcagtgtgacatctgcgggaaggaagcagcctccttctgtgagatgtgccccagctccttttstaagcagcatcgagaagggatgcttttcatttccaaactggatgggcgtctgtcttgtactgagcatgacccctgtgggcccaatcctctggaacctggggagatccgtgagtatgtgcctcccccagtaccgctgcctccagggccaagcactcacctggcagagcaatcaacaggaatggctgctcaggcacccaaaatrtcagataaacctcctgctgacaccaaccagaygctgtcgctctccaaaaaagctctggcagggacttgtcagaggccaytgctacctgaaagacctcttgagagaactgactccaggccccagcctttagataaggtcagagacctcgctggstcagggaccaaatcccaatccttggtttccagccagaggccactggacaggccaccagcagtggcaggaccaagaccccagctaagcgacaaaccctctccagtgaccagcccaagctcctcaccctcagtcaggtcccaaccactggaaagacctctggggacggctgacccaaggctggataaatccataggtgctgccagcccaaggccccagtcactggagaaaacctcagttcccactggcctgagacttccgccgccagacagactgctcattactagcagtcccaaaccccagacttcagacaggcctactgacaaaccccatgcctctttgtcccagagactcccacctcctgagaaagtactatcagctgtggtccagacccttgtagctaaagaaaaagcactgaggcctgtggaccagaatactcagtcaaaaaatagagctgctttggtgatggatctcatagacctaactcctcgccagaaggagcgggcagcttcacctcatcaggtcacaccacaggctgatgagaagatgccagtgttggagtcaagttcatggcctgccagcaaaggtctggggcatatgccgagagctgttgagaaaggctgtgtgtcagatcctcttcagacatctgggaaagcagcagccccttcagaggacccctggcaagctgttaaatcactcacccaggccagacttctttctcagcctcctgccaaggcctttttatatgagccaacaactcaggcctcaggaagagcttctgcaggggctgagcagaccccagggcctcttagccaatccccgggcctggtgaagcaggcgaagcagatggtcggaggccagcaactacctgcacttgccgccaagagtgggcaatcttttaggtctctcgggaaggccccagcctccctccccactgaagaaaagaagttggtaaccacagagcaaagtccctgggccctgggaaaagcctcatcacgggcagggctctggcccatagtggctggacagacaytggcacagtcttgctggtctgctgggagcacacagacattggcacagacttgctggtctcttggaagagggcaagaccccaaaccagagcaaaatacacttccagctcttaaccaggctccttccagtcacaagtgtgcagaatcagaacagaagtagtaccaatcaatgtcacatgaacaaacaagctgcccccagggtaccatttggggaggggaaatcttttctttctttcccccttaaaaaaaaacacatctgccccgaacactttcccactgttattctttcctcatatcccaacactcagaactcttgtgacattagccagtgggggcttatggttgtgtgaaccatgtatgaaaatccagtgggccccaaccaaggagacagacagacttgggtctctttcccccaacttttccacatggtcatcgtgaaataaaaagtccactctggagtcaagtatggaattcaattccgctggtcaggttggaaggtataggggctctcaaagcgatttccccaaccagacagagccccattgagggcacctaggaacccttgggaggaaatggtgttctttcaaatcagtggcgatttcctgagcattcacgtgttctaggccgggtgctagtcactgatgagagatacaggcctcatccctgtgagcctggattccaaggctttcaggaacctttgaccaggaagtaacaggaagttctgaggggccctggggctttagactcattttgaaatgtcctttgtggcaccagaagtggttgtgttgaggaagtgtctcttggctgcggtgtgcatgggtgcgtgtgcatgcgcgcacactcacagaggtctcctctatagatgcaagggtgctgcattgaggccagcaaggctgttggctgtggggtcgccgctgctgcttttgtctgggctgtgcagagtctcaagatcagtccttggaggagcaggtggtcaggggcagtcgggctctgtgcgaatgtagatttccagcagtggaagaaggcatttggcaagcttctctttctttgcttttgtttctacctatttttctctttgtacatgaatccaccccatccctatttccctaaaacactcaggtgctttcagatttcagagcctcgggcagtggacatagggaatctctggcaagctctgagctagacacaccagcttcaggaagagtaccagatcctgatgggaaatttcttttccccattccttttccctcctgagtggagggagtcctcttcttcgcctccctgagaattgctgtgctctgtattgagagcacctgcctgctgacttagctcaaaggcaagccagaacccttccctgaagactggcaagaggtggtgtttagagcaacgtccaggctaagagatgactcctattaactgctgattatctgttactgctgccctgagctggggcccaagggctgggaaatctgttggtgctaccctgccctaccattcacccagctcacagactgccaacaggaagtgctgtttggctagtttcctcccacttgtctacccctcctttgtccttagaccaacatgtttacctctctgctttgccaacttagccagcaggccatccccggccctaacgtctcctggccattatctcttagttatggctttcacgctctcaataggattctgtatttggtcccaatttcctcaagttcttattgaggttactcccatcaattccacggagggaacagtagttattatagaagcatttgcgctttatctaaagattaaaaatagaatctgcttttatttcccaaagtctgtctctgaggttgagacacttgaactcaggcagagggacgaggctgggcagggctgtcctgagtttaggggcctatccctgcatttcactgagacctcggaatctcctctgtgaattccacctgcctagttctcccctttcatcctctctctcttcccacatcatcaaagaggaaaagctctttgttcaaaaggaagagaaaacgtaaagcatcttattttcttttaaaagaattttaaaccatgaaaaagatatttttaaagaaattcaccgagaacattaaagttcattatattaagtatttatcatgtgtgagaataataaatatataactgcagctagtaggtccctttccctaatcttttaggtcatatgagtagggtttgcttggtgccagtcctgtgcccttttctctccagtcatctgtagttgtgatcagaaaaaggtatctgcactgcactgtcagagtctcctttcactatgttgtgtgttaaattaccgtagctctttgtttcatgaaataaactgtgaatttggggggggcggggggagggcgtgcaggccatgtaaaaattttccgtggagaagtttgattctaaagtagcttctctaaagtaggctttggtaggtaatcaacttgacagcagtctagatgtctcacaggacaggagggagtgagggaaaggggccatgattggctgctttgtggttttattttggttctttccattctccgccattcattggaggcttcgttccagacctgcctgggaaaacagcttctgagccattttggggagcagttcttcatctgaatggatggacatctgggcttccttcaagggccattgaatgggaactagaaaaccactggaaactagaaatttgagctattgggcccaccagtagcagcatgtgatactagatggttaaaatcatgaaagcagtcactatccaattagaagcagagtcacaacaactgttgggaaatgtgactcttggaggaaggtggggagggagtggccttgccagccctgtgggacgtcccctgaagtttgtaataagaccccttttccaaagggatgtgaattggagtgaaaaggaaatctttcatcttagaaaacttctggtccttaacgcagggtggtatttgggtatgtgcttggaaattgagatctcaagagtgtttgccttggagccagctccccaggaggccttttccagggacaaggcaaaagttgaaattctccatgggtagctagaaagccaatacatctagccctgctaagtcagaaaaagattatgaaaaatgttgaaatttacattcaaagcctcatttgcttatcttgctggagccaacccagtctaatagcaaaatagctgtcattgatacagaaacatcctcatttttaaatgtctgctttaccctgttactgagtttgagatgacttaaatcactgtgttgaccctcttctgaaccaaatctttagcattgatgaaaatagttattttattctttacatccttcaccccacactatggtcagggcatgaaacaccctgttgatcccttcccaggctcggcactgtctgctcactggagccggactcccaggttgtaattctaatgttgcctcatgagaacagaatggcagaaagtttagtcctgacagattcccccatagggagtaatgaggacagcatgaaacttggataggttttacccttagtccctataaggtggattttactaaggttttttaaatgatactgtcatcctcttggggtttatcagccaggttagaggagcccagtgtcctaacctctctcagatcatggcagagaaggagctgcctccagcccctttcttgctgagtctcatttgagcagttccatgtgtagacattccaagtcactgcttggtagttgctgtgggagcctgtcattggctatggccagttagttctcagctgagcttcctagggccagtgcaacagggccagaggctgctatagtgtaaattgaaataagaatagatcattgttttgtacacacacacaataaaatgtaatgatggtgctaatttcacggtataaataagcactgccaagggttgagggactggcagctcaagaaacccgggttcctgtttgggaggagattttatgtagaaaagtttgaggctttgttaaaagtggggagaaggaagatcctcagtgaagcctgcacccaaccctggagtggcccagtgcaatccagaggtggaagagatcctatatccaggtgaaggtggccattgagtttctcagggctggggccaccttgtccatagcctccgtccacgctgcctggagcaggttgttagagagctctggttgttgggtcttcctcagctcccttctgcccctctctacctcttccactcatggaagcccctctactgcttatgaagattaagggtagtattttctaaggaagtggaaagaattaaactagaaatccacaacctcggaagaagtgtttcgagtttaacatgcgctgtttctgcttatgtggttccttctctagagctgctttcccatggctttcaaaacatcaggttattgtggggcttcaggtgtaaggtcctggaagttcagcaaagtttcgtggacaagacatgggcacagagagtagaagcagaaataaatggttctatgttttcaacttccagggttggggcaggccagagcaaggcggtctcatcgaggtgggtgctacctgtgtgtgtgtagatgagtgtgctgaaggtggggagggcagcacacagcagctcatggcagagccgcctcctaggtcttggcaaagaggcaagctgacgatagacatctacctatattgttaagaaaggggtcggggggatcagccaaggtccatcattgcttttttgccgcgccccccccccccgcccccatagattgtcagctgtaagtgaaactcctagtgaaaaagaggggagccctgtgttaggagtccccataaacatgtactgtaattctttgtatatagaaaaaaaatttactgtaaagtaaagtttaactttactcatatatggcccttgccctgtgttttgttttattggctgtggggagttgtagtctaacaggagggaggattgtttggggtgagagcagaagccagccccagagatagtacgaggtggggggcggggggcgcagggatactgtgaagctaagcccttcctccaagcacgtcatgggaatagtgtgtttcctctcagcagccacagggctgcccaagcctctttctccccctgttgggagtggctggtttcagtttcagtctccctccacaggaagcccccatcactcatgaaggaagggcagtttgaggaattggtttttaaaaaggaagtggaaccaaagcactctctgagtgtgagtctgaccatgttggctaagttgtacatttttccaaggcaggtgttggccactgcagaggactcagcccaggcctaaataaaggcaggaaagcagaggcaaaggataaaactaagggaaagcccctggcctggggccacaccctccataccagaaagggctgcaataaatttccttctggttgagcagcaagtgtcagccctgtttacagttaacacctgattcctcagaaatatctggatcttctttggggaaaacttgggagtttgcttccctttgtgacctagtcctgaacttcctgccctttcagcaaaaagtgcttgggaagattgggaaaaacatttagtactagagttactcttcactttcttcacaatccttgggctgcatagtagtcaccttattttacagatgagaaactcaagatgaggatttaagtcccttttctaaattagcagctgaattggaaccaaatctggatccattagacctttctggcttacagaacttaggactttcctaccattaaaccacattgtaggatgtcactgggaagctcaggacctgagtcacaggtctgacataggggcccaaacatgacagatgcagtagagctagtcagaccaacctgtctcaggtaggaatgcttgacccttttatttcgaagcaactcatgcactcttttcagcactcagaaggaactgtgagcttttatactactacagccccagtatctcagcggtaaccatggggaaaaaagtcttgttttccaaaggaaaatgagagttgggaggagccttaatataagcagtgaggccagccgggtggccccagaaagaactaggtgtcttgacacctaatccacacagcagggaaaggggctgggtgtgattcacagtgcactgattttatttacagatcaaaagccacttaaataatctgcagacacaagtgctgtccagggcagaagcctggggtccaaatcagccttatccctcctcatgcccacagtcagcccaatgctgtctccgttccatgggccagcacaggcaggcgccactctgctgacatgaggacctggggtagctcagacatttgactacccaagcccagaaaggagctgggtccagcccttacggggaattcctttaattcccccaggccaggtgagtgctgactcagtgatgacaacagctgta

SEQ ID NO: 96783 - DNA, 14385 bp, Homo sapiens
gaattatatgattttaaaagtcaatgcttagtctaagctctttcaatgagtataaatgaatgctgggtaacaagaaagcattgtgtcacaatctagttggctacattttccctttgttagcagcataagaaatgatgatgcaacttaaaaatgatggcatcttacaaatgctgaaattcagtaggctgaatctgatctcaccacttccgccctggtctgaggtgccggtacagtcacccagctttcacaaaagtctaactgatctccttgctgatattcctcctccagtctgcagtagtggaggtgcaaaaagcaagctgcagtaaggaggtaagggtacatcctgccattgccacttcctgtgtgaccttgggtaaatcacttaaccactctgtgcctaggtattcccccctgtaacatgggaataatgataataatgcctactttttggactgtcataagaataaatgaattaatatatgtaaagctcttaaaacagcctggcatattgtaagcccaacagccagagtggtactttttaaagataaatcagatcatgtcattcgcaaggaaggaagaaaggctcccttaaggcttcccatcaaacttaaaatctaaattccttaccacagcctgtgtgctccaagatgcagctctcctccactcccatctcacttcctaccactcgcccagcctctctggcagcaatggcctccctgaggtgaccaccatactacaaggaggctcagggactttcacccgagagttccctgtgcctgagaggctgctgctgccgtgacctcagcccagctcactccatcctcaccacctatttgaccttctctcacctaccctgcctcatttgccctttgaagcagttaggacaccaaatgcttgtttactgctctcctccttcccaagaaaatgaaccgcttgagggcaggaactctcctcatcaggctcatcctgaatctccaatacctagaacagtacctgggccaggatgcatgggtgaatgcctgttggatgaacaagcaaatgaaatggaaccaggttccaaaatcaccaaactagaagcaagtagagcttccatttcactgtacttccaataaaaatacaaggtatctcagagttactttcatcccccttcctgttccatcacaaagacgttaaacctaaaaccaaagtcacttttctttgtgtacgcctaggacatcttataggcatacaggtggaaaagtgcagcaagcagtactaatcaaactaccaaaaaaaaaaaattgtgataatttgatattaatggccctagcccaacagctgtcaagctatggatgaagcaaaactctgcaaatggaaggtgcggtaagccctgccacgaagacctctgtgggctactgcgctgtccctgtccacaccccagataaaaagctgtcaacttggaaagaaaagtcactcaaggaataaggaaggaatcttaatgatttcactggacaatttttaattttcccatttgcttttcctacctcacatattatgaacatacaaaataatatgggtttttttttaacaccatttccatcacaccaaattacagatttagaaattcctattttagaaagttgacacagaaaaccactgagttttctttttcttttctttttttttttttagacggcgtctcgctctgttgcccaggctggagtgcaatggcacggtctcagctcattgcaagctccgcctcctgggttcacgccattttcctgcctcagcctcccaagtagctgggactacaggcgcccaccaccatgcccggctgattttttatatttttttagtagagacgggttttcaccgtgttagcaaggatggtctcgatctcctgacctcgtgatctacccgcctcggcctcccaaagtgctgggattacaggcgtgagccaccgcgcccggccaccattgagttttctaataaaattggacctctctgagctttttggtttcaaactaagcttgataactttgctaaacttttttataggctggtaaatgtgtaacttcatctatttctttccaaagttaactacctcctatttgaattatattgtttgatcacagagctaatcacagcattcaagggaataaaacccagttcttaagtaaaacttacagctaagaaattttgataataactaattagtaggctttgcttgtacccacgtgtaagaatatgcactatagcaaggtttgtcatatattaaaacatatacaatacacactttgactcctgctaggacaatacacaattgggtgcagcctttgaaccaagtgcccagggatggagtggaatgaggctttacctttctgtaggtactgtgtgcttgcttatctttttaaatctatcaatacaaatgtactgctttatgccagaagcatttttgatctctacctatcttgttaagtactgtatctcctagggcctaaaacagggaaggcctagcacataacaggccacagacaagtatttgtcaaatggattaagtttgttttatgcattcactggacaaatagaagttaaaaaaattcttattccaaaaatctaaaagaattcaaatgttttacaatacataaattcacgaggaagtgaaattagcctctgagccaagatgttttttgtggatgatgttatcacttcatagctaatccttcccccttggcctcccagtaacaactgcatgagcacgtcacaccagagacacatgtgtcatcaatttctcagagctggatcgattatttttaagcccctgtccctgcaggagggcctccttttttcctttccaactacagcttcaaatgtgatgtagatgtagtgggatatacccagtcttaggaaccctcagacatctaacagggcatcactcacagacaatgcattcctttcagagtctgtgtgagttcatcctctccaccacaggcaagatataggcacccagctcagcctgtctcatcaaatacttaccgagcccccgttgtggctgtccatgcatactggaccctgtcctccggaggaaccgcgcaatgagagacagttaattctcttatccaagaaggaactgtatcagccaagcttttatcctttcttccttctccctttcccctctgggaaaccctcagcaggcaaaaaggatacagcagtctcaaccccaaggaaaagatggtcatcaaaagacaattagcttttctatctcctagaaacaactgctcttaagacaacctagcgttttggaaaatgcagctctgggtggcacctttcgaagcaataaaacatacggcaaaatttaagaggaaacaaagaggattaaatacatatttgtattctcaattaaaaaaactacggttctatcatcttaattatggagttaaacgttaaagaaacaagtttgatatcatgccacttttcgttatacttcgagaacggaatgcaataatggttagtaagaaggaagtaaaatgcctgtatcagaagtaacagcccaaacctgctgaccaaaaatattaactgggaactaaacaccacggtgcagatctccgacatagaaacctggacaggaacacgttttaggttaggttttccagcgtgtaaatcgggactccaacacgtttcagcgtccacagcccaatctgacaccttccctcgcacccatccaccacgcaataattttccttctgatgtgaacacgtcaaaagtcacctcgggcccccaactgccccagattgctcccgatcgctgcagacgcccggcacccgcaggaacttccctggcccgggccgcccgcggcgcagagcatcccgcgcggacactgcgccctcggaaggacacgcaggaccgtccagggcgcagactcgtccccaacgcagtctccactcccgtggcacagcgtcccctcccaaggcagcctcccctgcccgggcccagcctcatcccgggcgcagcctgccgtcccccggcgcagcgtcccatgccgggcggagcgtctccccagggacatagcctaccgtccccaggcgcagccttgttgccaacgcagcctcccgttccccggcgcaaccttgtacccggggcagcctctggtccccgggcgcagcctcgtccccagcgcagcctccgatctccagggcacaccgtcccctccccaaaacgcagtctcggtccccagggcgcagcctcgtcccggcgcacctgccctccccgcggcgcagcgcggcgcatcccacgcggactcggcgccctcgggaggggacgcggggccgcccgggcgcagcttcctccgggagccgagcgccggagcagacgggcgacccaggagggtgggtgcgaggcggtgccgcggcaccctcgcttctccgcgggcgccctccgctcccgggacggcccgcagctccggccccaccaccagtccctgcccggcgcttacataaacgccgccaccgcggggtccggagcccgcgcccgcccgagccgccgcggccccgcgccgccctcacctcagccgcagccgcgccgcgcctggtcctccgcacgcgcgccccacgcttcggccgcagtctcgcgccgggcggcgctctgcctcgttggttgtgcgcagcggcgcggcgtggccgtggcctcgcgcggcccggagccccggccgccaacctggccgcttggccgccgctgccgccgccgccgccgccgccgccacggccgcctcagcgcctcagccccgccgccggcggctccgccccctccccgcccccgccggcccgccgggcgcgcgcacgccgagggggcgggggcggcgcagcgacgccggacgtgcgcgcgctggggcgcccgtgtctgtcgtgggcagccggagctgtggcacctccctcacgaccacctgcggcggacgggcgcggggccgttggggctggagcgcggccggagctgagagaccgcggctgggcggctccggagcgtggggcgagagcgcgggaccggcctggcgtcgcggcgccgcccgcccgagcgcggctgaggagactctgcccgccttcgttttggggacggggtctcactgtcgcccagactggagcgcggtggacctccgagctcacgcgatcctgccgcctcagcctccctggtagctgggaccgcaggcgcccggcgattggcgtttgcgttttgcggaggtggcgtctcgcggtgctgcccaggctcccgggcccccgcgctcctccctgcagcgggcgctgcccccgccgagcccccgccgagcccccgccgagcccccgccgagcccccgccgagcccccgccgagcccccgccgagccacccctgcttctccctctcccggagttgcctgggacacgcgggtcccgccggccccctctccccgcccgtcatcctcactgtagactccgggagaaccaggtcgcggcccaggaccctggctggacacggttcccgccgtctcctgtttagtccgcactgacactagcagctgctccagttaccaacgtttaggtgatggtggttttgtttgattttttttgtttgtttgtttgttttaggttgatagtaaaagcatttttttatagcatatgcaatagacctactcttcgatttatctatatttactgactgttccacagttataccaagaaatgtttacacagatgatgataagcatatgtagaaatgcaacgttttcactgaccggaataaccagctccaggctgcagttctctgcacgaagataaagtttgataggcaaacttggcagctcctgaccgcggcgacctgagcccagaggagcagccgggggcggtgggcagagccaggtgtggacaagcgggtgggtcccgcacctgggtgggggaagcggcaggttccagggtcaaattgaggttgtactagccctggcctccaaacctcaggcggcccactctgccctcggcctctttcctcccttgtaaagtggggagtaagagaccatcgcaagccagggatggggtggcgcacactgtgatctcagccagtctggaggctggggctgggcggtgggggggtgcgggtcgcttgtgtctcagagctggagctgtggtgtgcgaggccgaggtccgcgcctataaatggccgctgcgctctggcccgggcaacactgagactccgactctggaaaacaacaaaacttaaaagacgaacacagatggaagtttgggagcytggtatgcggtaagcactccgcaggtgtcagccgccagcccgcagtcccggacaggtcaggggaaggcccgcggtatgcagcaggctgccggcttcagtcactgcstggtggaaaacaagcctgtctttggggccagccagctaacaagtgagcccttcaccccatctgaaggcgaagcacccaaaggggcaaccgtggacggctaaataaaaatcaagactcctgggacgccttctcgggacacattcttaaagagatacgtgcctgaggacgttgtgtgtatttctgtgtaacaggccaccccaaacctcagagggcgaaaacctctcttcactgctcatgactctgtgggcctgcagcttaagccggttcagctgggacggcttgcctcggctccatggggtgtctgctgggcccacttacaggcaggcgccccgggcagatccgggccacatgtcacccacccaccgcaggctggccgggcctccctcccgtggtggctgggctccgtcggcagcaagaaaaagcaaatccccatggtgcttccctccatctccccaggagggtgagatggccggggcctgagtggacgtgaggcacygcacagrggacgggcacggcaagcatggttcatcggggctgtcactgcagaagtcttccacaggccttcrctgaggtgcgggttggtgtggggaatacaagggaactccccagaatggaggctgcttgtgyaagtttcaacttgtcctttttctccstccagagcagcagagagcggatggcgcccaaggccgggaccctctgctgctcccacaggcctctcaggcggctctgcagraccagccagcagcctctgatgctcccttcctattccatggcttcaggtgccatcctctccacagagacggtttctattgtgacgctctccctgacttggaagaatggcactgggaacattccccttggtgctgatgtcggggaggaaagcagtttccagtcgcctggggccaggacatggcgttcccagctgttgtagagcatgaagcaccaggatgcccattcgggtgcctgctgagatcaggctctttgagaaggaatcctgtggtcgcctgaggaagtccaaaaaaatttcgaggacatctcagccatccatcccctgttcactgtggaggttgaacaccggggctcctggaggggggccctgggtctccacagaagtgctggcagccaccatccacttcctggccttccgtgcccgctccacctctgttctgttgtttactgtctcctttgtgggaattatggaataaacaatcactctggtgtcctggaaaataaacctgatgctggagggcttgagtgtaggaatccagctgggctcccactgtctgccccagggtgcggagttaggctttgcataagcatgtgagatgccaaccgctatgaaatgtggtctacacagcaccaaaaatccatttcccacgttttcccttcagtgcagttaaatggcatgaccctgtgactgtctcccacgagaagaactaaaaattacgctggtcctgccaatgcctacaggatacggtggcacaaaatgatttccacggtcttaggatatagacccaggccgactcgagagattaagtggatttcaaactgtggtmttgagccttctgggaactgcccgaaaggaggggaaggcgccagcctcggagtggtccagctgcccggcctgttcacacactggcctttcagttgaagacagtgttcaaagcttacccgtgtaaatgccactgatctgtgaacccccttcctgtcatgcccaggrcctggcagactgtggctagaasggtgggatcagagcagtgggtcacgtgacctgcgcacgggtgtgctggcctccctgggccgcggtggccaggacagccttcctttccctttccagccacacagggcaatccgtgtgctcagatttctgtctcatcaattacagagcgagctgccaacctgctgtgctgagactgtggcctggtcttggtcctggtgtcctagggctgatgactgaccacagcctttgtgcttttgaagcctatttgactatagtccttgtgtgcaactaaaaatgtagctttaaacaatcttgctttgttttaattctgcccaatctatttgagaaaggacactcacaggtactttttagattgtagcctaaagtggattattgatttccttgtttctcaaacgtcaggaggagcataaaactgctaataagaggtgaccaatattcggtgataccgtgatttgagacataatattttttgccctatattttaaaaataaaataagaagacatgagactggagtggcaaaaaccagatgttgccaaaccattcagtcagcagctgccatggtggtggataccatgtgtgagacctgcccagctcacaatgtgccactgtctctaggacaactcccaactcccacagtgacacagcaggaacagtctgtctgtgctctgtgacaggcacacagcacacccccccacaacccactccaggacctcaggcgggattctgactcccaggatggccctgggtgcttagagctagcattgagacaatcgtgagtctctctttgtgcctaggcctgaagggttcaaatccagcacaattaggatggtctccatcactggccagcctgaagagagaaaactggggtagacacacaggggcaggagagagaggacgaactgatggcctttcagcgccgtaggcagtgtcacgtgcataggtcaacacgtggccaggaagatgtctttgcttcagggcgttcatgttctagtggggagatggtgtcagggagcagtgcagtgtgttacctgagacaccgtccagggcaggaacagaggcgtgacagtcagtgcggacctggctgtgccatgcagcactggccaagttgtttggcctgtctgagcctgttctgcatccagaagagggagacgatgggtggaaaagctccagtggtgatgtacaaatgcaggctcctaatgaagaggagtgtgaacggttgcaggagtccagggcactgcagctgcaccgctcaggagtgtcagagcaagctgcaggaagctgcactgagccttggaggatgagaaggcactgacggcgggaatgcctgtggcagaggaaaaatgcaggaagctgcattgagccttggaggatgagaaggcattgacagcaggagtgcctgtggcagaggaaaaagcacttccatggcacatgaagtcagagaagagaggaggcttctgccaccattggtcagaagagtcctcctggtcaggccactttgcactctgtagagaccagggaaagggaatgtgctgcgtggttaagtcagaggtgggcaggctgagcctgggcccagtggtgtccagtcaacagctaagaatgaacattaaacatgtaaagtgttggggtgggtgggggcttatgaagaatagatgcagtgggcttatgtggccggtagagccatagatctttgccatctggccctttgcagagaaaggcaatccctggtttagccaagtagggcctagctctggaactgggaggtggagcagctgccatcgaagtgcatagactgtctgggggtgggagaaacacaacccaaatcagcaccccggtgaggggacggaggctctgacttacccggcggtgtctgcctagagctcaggcatgcctgcggcttccatgcagaagaccttcatcaggtgttgacagtggaaatggaaagagttaagaggcttttggaattagactcaacaggacttagtgatagagtcactagaggggtctggggaggagaagcatcagggcttacccaggatcctggcttgcacatattggcgggtgatggtgctctgggatgacacgggggatggggggacgaaaccaggcattccttttgggtgcgttaagtttgcgatgcctacaggatgtctgagtggctgtgttgggaagatagctacgtacaaaagactgatgtccggagaggagagccgtgctggagacggacacttgaaacccttgaaaatggaagacgtcaccgatcccctaaagagagaatggagaaaggaaagaagggaacctggctccagacccgaagagcctcagcctagcattagaggtgagcatagagagagaagggagtgtgggaggcgggaaggcccagcgaggcaggagagaaaagacggaagcgtgtttctctggaggccaaggcagggggactgcttgaggccaggggttggaggcttcagtgagctaatacctcacacaggttgtattcttttgtgtcttgattatttcacttgatcatgtataaagagaggaaagggagacataaatatggttatgtaggcagataattttaaatctacagccaaagtcttagatctaattaaaattcagcaagattattgggtataaaattggcacacatgcacacacccccaaaatgatttctatatatcggcagcaaacaacgtgtaatttggaagatgatactgttcaacagtaacaaaagtatgaactaaaaatagatttaaaaaaaagtacatgatccttaaggagaaactcatttttaaaaattattaaaagagcaagcgaatatagagacacaccaaacacctcaaattctttgtgggatgagtataaatatataaagcaaacaaaattagcagcttcaccaacttcttttgaatgatactagatttttaaaataaatcagatgcaaaaacagtatggctcctggtaacatactactctaaaataatggactagagccaggaaaaggagatttttttttctattttgccgagttatgtcttaattattatgttagcagtctttcctgagaagctaaaaggtaattagcaactgaagccaggcaagagtggggaggagggagggcgcgggcaggccgcgctctgctgaatctccaggagctgttctggaggggatggaggctggaggctgagcctaagtacagttgggttagtgacaaattagatggctcatgtggttatttaaagccttctctctaggaaactttcaactaccatatattcaagatcttgcagttgatagttttaaactggaatctcagggactcgggctgactgtcacctatacaagctactcagggatacagcagccatgaacggtggtgtgaaaagtggccatcatcatgtattttcaaacttttttgagatataatacatacaccaaaaagtatccatatcataaatgtacatctcaacacattagcccaaagtggacacagctgtgaaacctccaccagggcgagcagcggaacgtgaccaactcggagtgtccggcgtgcccctccatagccacagctgcctctgggccttaaagataagctctaccctgactcctacctccgcagattggttatgcctgtttttgcttcacataagtgacatcacacagaatgtattctttcgtgtcttgattcttccacttgacgctgtgttcatgagatccatcaacctgtgcctctgtgaaccttctcttacacctctcagcgcacgtgtgtatgtttctgttgggttgtgtaccaggtcacaggagacacataggtccactccagaggggacactgattttccaacgtgttgagccattttatactcctaccagcaggcgaggagctttctggctgcttcttgtccacatcaacagctggtgttgacactttgtccaccctggagggtggtggtagttcctcacagtggctttaatctgtagttcactaatgaccagtgaggttgagcatctttacatgttcttgttttccacatgcacatcctttctggtgaagaagccacaagttttctttattatttatttgtagaagttatttatatattctagacccaaactcttggcaagctatatgtgttgcaaataccttctctcaccctgtgtcttgcatttccataatcacagtggagtcttttgttatacaggagttcttaatttcaatgtgatccaatttatctaccgtttttttctacggttagggtttttttgtttcctgtttagaaaactcaactactccatggtcatgaaggaatgcttctgttatcttctggaaggtttattgtttcaattttcaaatttagaggacaattcaccaggaattgtttttctgtacaatgtgaggtaggggttcagagtcagtccataactgttgtctgtgtttggtgcccagttgacctagcaccatttactgacatgatttcccttctccctgctgctctgctgcagtagctttgttgtgaattcagcatccatataggcatgggttgttgcttttttctgaactattttgttaggtgctgaggactggccttgaactgctgtttcctgtcctaattactgaagctttctcatgagtcttcttttgacaccgtagaatcaccttgcagtttttctgtttttcaaaattttcttggttatacttggtattttgcatttccatttaaatctttgaattggcttataaatttcctcaaaatattctgctagaatttttattagaatttcattgaagctatagatcaatttggcgagaacggatattctcacaatattgagtgctccagttcacgtttagccctacattgatttaaatattctccagttgctctcattatcttctagtcttctgtgtagatattacatacatagtccattagatttattcgcagacatttggtgcattggatgatcatttaaaatgttccctatttttattttctgaccactggtttctggtttatttagaatgcagttgatctttgtgtattgaccttgtaccagcagtctttccagattcacttaataatttcaatagttatctgtagattctattgggtttcttatatacgtatcattttgtttgtgaataatgactttttcattttttcctttctgatcattttatcctttattgctttcttcttggcttacctcaccagctgctgctgaaaagaagtgttagtggtgagcatccttatttttttcctgacctcaggggggacgctttcaatatttcactaataagtgtgagatctgtggtaggatttttaaatatagatgcccccgatgagatcaaggaagctcacttctatctccactttgctaagagtttcttttcctgaatgcatgctgagttttatcacattctttcttctgcatttattgagatgatagtatgatttttctgcttcattacattaatatgatgaattaagttgattaaagtttaaatgttataccaaccttgcatttctggaaaaagcccaacttggaaaaagcccgggagataccccaggatccttctagcaaatccccctctctgcttgcccacccccttgcttcaaggacaaggagtggaagaaacaaggaaaatggtgaagaagcccagacctcagggctccacctggccctgctgaggcctaaggcatgggggggggggtacttttgtggcttgacttgggggtagtgggggtctcctgtggcctgggtggttgggagtctgtggcctgggtacggggcattgctgactgctgtgacctggcccccctccccaactgcgtcctggccatggggggctgctgtggcctggccctgcctagcagatgagaggcttcgggcctcattttctattgagtgcatggaagcagctctggttgatgtaagaccaggtcacttactggacattggtcccttccttgggcttcagtctcatcagagaagttatctgtaaagtcatgagtcaacaaaatatgcctcaagcaaaccgtgtaaaaagaaagtataaactaagcattaaatattccatcagccacagaaatgtgaggcactgttcccgcctgcactgaggttcagaggctcgcccctccccagcaccctccaccgtgcggtgcagtgctcagtgtttgccagcagcctagggtcttcgaggagaaaagtctctgccgtcctgtgcgggccaccgtggagattggtgatggagctattcatcagttcttcggccagtctcttttcaggggc

SEQ ID NO: 96784 - DNA, 16808 bp, Homo sapiens
taattgtgtgtagctgtggctaagtttctggccttaattttctcagggtggtactactggcttgtctctgagccataatgaaaacctaatagttttagccagctagaatgtatactggtgcaggaccttcctattcacaaaacactttcaggctcataaactcatttggtcccatgaaagccacatgagggaggaaatgctgaactactgctccattttactggtaagaaagcagccattcagagcaattgtcccaatgtcacacagcaatacagtcagaattacaccctcagtgagtctcttttgttttgagacaagagtctggctctgttgcccagactgaaatgcagttgcattatcttgactcagtgcaacttctgccttccaggctcaagcgatcctgtcacctcagcttcccgagtagctgggactacagacgctcaccaccacgcgagcatagagaggggatttcgccatgttacccaagctggtctcaaactcctgggctcaagggatccacctgcctcggcctcccaaagtgctgggattacaggtgtgagccaccgcacctggcccttagtaagtctcttaatgtcttgatacgtatcacaatcccttcccagcctgaatctgcctttcatggccaatgagccttgggccacaacctagttccttaccatcacaggcagaaggcttggcctgactgttgttcttagcatgcttctgcctcccttcctggctggctgcctgcttcctgtgaccacttcccacggctgctcgtggcttcctcatgatggcctgaaacaaaaagacccagccaaagcagtcagtcacaatgaggccaaattttgaggccttccaagggtgatagctatctccctctcatccaccattcacatggggtccagcttctctcaagcactctcaagatgctcacgggtttactcttggctggctgcagcactgagatacaactagtatagctgagcaagtggcctcaagggggccggcgttacagccctggagacatgcaaagactgtgaggccagggctgggatgggtcaaggatgaaagcctcctgtttgggagcatttgtgtatctctgatgcttactgtgactgtgtgtgtggataggggttgtttaggtgtgtctgggagaatgggggtaggcggtttctctgcctcttagagatgtagcatggttacactgaaacagcctgtagtagtcattaagtccaaaaccttcattttatcctagaagaaaccaaggatcagagggacaaaagatctgtctgagaacagatggcaaatcagtgggagaacagagattagctatttttattcctaatctagtaaaccataggtggctgaccatcaacaatgagaaaatgtgcctggttgattttcactgctccctaactgttataatggccgccttttctctaacagctaaaattagttgatattttgtgagtgcctactctatgtcagaccccatgaagagctttaccggatctctcaatctcctggtgactctatgaggtatgtactagtatcacctccaccttagttataaggaaattgaggtttatggagattaagcgacttgttctttcaaatccacgaccagcattcttatactgtgataaaatgcagtccctgctaagcctctgtatcaaactctccccccaaacctttgactttaccacctcattttcatcaaaagagcttgcctcctccttcagaaaaaaaaaaaccaacttcaaatctacctccatttgcactgtcttaccctcctcctcttcagggtcctgctcctccaatcccgtctaactgttggaactcagaaactaataccccaggccaggcacggtggctcatgcctgtaatcccaacactgcgggaggctaaggcaggcagatcacttgaggccaggagttcgagaccagcctggccaacatggcgaaaccccatctctactaaaaatccaaaaaaattagccagacgtgctcgcttgaacccaggaggcagagcttgcagtgagctgagatcatgccactgcacagcctgggcaacaaagacagagcaagactctgtctcaaaaaaaaagaaaagaaaagaaaccaataccccaaaatatggccctctgacatgctgaactcaagaagccgcaaggtctctctgatccttccaccccagactctcccaaagccaggataaagttgttctctggaactctttatctgcctaaagtccaaactcactaaaaagaatacttgttttttcttcccctcccaataagactaacatgtaaccacacctgaacaaaccctttcacaggtattgtgtacctcaggatcactcaaattccaaagagaactattaacaagtcaacctctgtccccattccattctctctagtaatcctttattgcccttcaacagaatctccttctggccaaagttcggtttatttaaaaacaaatagagctggacatgctggctcaggcctgtaatcccagcactttgggaggccaaggcaggaggattacttgagcccaggagttcgagattaggcttgcaacatagcaagaccccgtctctacaaaaacagaaaaacagaatttctcttctaccccttgtcaggcctctgagcccaagctaagccatcatatcctcagtaacctgcacttatacatccagatggcctgaagcaactgaagatctacaaaagaagtgaaaatagccttaactgatcacattccaccactgtgatttgtttctgccccacgctaactgatcaatgtacttggtaatctcccccccacccttaagaaggttctttataatctccccacccttgagaatgtactttgtgagatccaccccctgcccccaaaacattgctcttaactccaatgcctatcccaaaacctataagaactaatgataattccaccaccctttgctgactcctttttttcagactcagcctgtctgcacccaggtgaaataaacagccttgttgctcagacaaagcctgtttggtggtctcttcacatggacacacgtgagacacccctcccataatctgttttgccagatggtatataaactcacgaactctgtagggagatgggtaatcactttatggttctcccaatgtgcatgttaataaatttgtatgccttttctccagttaacctgccttttgtgagctgatttttcagcagatcttcagagggcaaagggaaagattttccccttggctcgtaacacaatcaaatcccaccctccttcccttcatagccaaacttccttcaccaaacctgcttacttccacattcattctacaatctattctccaaagagcaaaggaatcttttccagatcacgtcacttccttccttataaccttcaatggtttcccattcttttttttttttttgggatggggtctcactctgtcacccaggctggagtgcagtggtgtgatcttggctcactgcaacctctgcttcctcggctcaagcaatcctcccaccccaataccccaccccaactccaagcagctgggaccacaggcgcacaccaccaccacatccagctaatttttgtatttttgttagagacagggtttcaccatgttgcccaggctagtctccacctccagagctcaagcaatcaacccgcctcggcctcccaaagtgctgggatacaggcatgagccacggcgcctggtgacaccccattatattcttttattttctttcttttctctttttttctccctccctctttccttccttccttttttcctttttctttcttttttaaatactgtaggcctttactatgggtcattaaattcttgagcaagctggttgtggtggctcaacactgtaatcctgctactctggaggctgaagtgaagaacagcttgagcccagaaggtcgaggctgcagtgagctatgattgtgccactgcactccaccctgggctcagcaagaccttgtctcttaaagaaaaaaaaagattgagcaaatatttatagagccccctaatatgtgccaagcagttttaggcacttggcatacttcagtaaataaaacatcaaaagttcctgccctcagggagcttatattctaatggggacagaaaaggaataatgaacataagtaaattccataagatgttaggtgataaatattagcataaaaagcaaaaattagaccaagaggggaaaaaaaagagtgccaaggtggggtttaatgttgcaattttaaagactgtggtcaaggtagacccaaagcattctaagtgagtgcaaaggccccaaggagggtgcctggtatgtctgtggtacagtaagtaggtcaatgtggttagaatggaatgagatgggactgagtggtagaagaggtcagagaagtaaaccagatgaggtggggagaggagggtcacaaagtaccttataggccattggagggatttggctgccacacccttgctcttagaaggcagtcctcttactacagccttgcaggtccagtgatccgggcaccatccgcctcatcccctcactatgctctagccaaggttgactgaatttagttgcttaaacacctcaagtgtgtctgcccaccttggggcctcacacaatccatttcctctgtttggactcttttatgcttttacctaacaccttatcatttttcaagtcttgactgaaatgtccaaatcaggtcccctcatcttatcctatcacatatttctgccttgtagctcttacctaatgtaattttacattactttgattctttccatcagtgtgtacttcctgaatttgactgtaaaaaacgacttgagtgcaaggactgattctcttgttgattggtgtgtgtccaaagtcagtgccaggtaaactgtacacaatagatacctgttaaatgaattaatgggatgggggatagtcaaaagagtttcccttttttaggataggagaaatccaaagagtttttttatttttgtttttttgttttgttttgttttgtttttagagacagtgtgtccctcactttgctgctctgccactcaggctggagtgcaataagaacatggctcactgcagcctcgacctcctgggctcaagccatcctctcacctcagcctcctgtagctgggactacaggtgcgcaccaccatgcccaactaatttttaattttctttttgtagagacaaggtttcactatgttgcccaggctagtcttgaactcctagggtcaagcgatcctcccaccttggcctcctaagatgattacaggccataagccactgcgcccggcccaagcagttctgaataatgatgaaatgggctcagttgagagaagctgaagattaactataaacaatgagtaacaaaggagcactggaaggcagaggtggatgggaatcgtagtgtttacggagggactagtctccaataggaattttttttttttttttttttttgagacggagtttcgctcttgttgcctaggctgaagtgcaaaatggcgtgatctcggctcaccgcaacctctgcctcccaggttcaagcgattctcctgcctcagcctcccaagtagtgggattacaggcgcccgcaccatacccagctaattttttttgtacttttagtagagacggggtttcaccatgttggccaggctggttttgaactccggacctcaggtaatccgcccgcctcggcctcccaaagtgctgggattacaggcgtgagccaccgcgcccggcctaggaacctctttcaaattcaatcaccctctaggtcgactataccgcctagctgcttcacaatttgtcccttcctcgccatccatactgccagccttaattcaagttcacattatcacttgattggattattacaaaagcttccctaccaatcggtcgctcttacaccctgggcagcctcctccgatggcccactccccgcctctttcactttctggagatcactgagctctccatcctctctgggaatttaccgatgcccagaacgcccttctttcccccacacgaccctctcctagtctaactcctgggcgtgctttaagctcagctcaggcagcgtcaccttctctggaaagcccaaacccagccaccccactaccccctacccgcggcccacgctgatgaagacagcagaacacggaggccccgcgttcccgccgcgagagcaggagagaaagattacctcccgcgagctctagcgcgcccggctttccggcgcactccagggggcgtggctcgggtccacccgggctgcgagccggcagcacaggccaataggcaattagcgcgcgccaggctgccttccccgcgccggacccgggacgtctgaacggaagttcgacccatcggcgacccgacggcgagaccccgccccatccccgactgcctgaaccgcgccaggagacggaccgcaartccagcgtacccacagacgactcaggcgggagacgagcggtgtcatggccgccgacagtgacgatggcgcagtttcagctcccgcagcttccgacggtgagcggcttcccagaggtagccttcaaagcctctgcgctctgggagaggggaaggcctcgggctcatagttctagaggctcctcaagcttcagaggactgctccttccgcctgaactagccacgaggagactacaagttccgttgtacaccgcggctccggctgcaaaagcctggagcgttgggagcatggggctgatggaggcatggcgggagatgtagtctggagctcataacggttagtagtaatagttgtgattcagttcagtggagtggattgagcgttgtgatccaaaggaaggtaggacgtattgggagctctggtgtggggcactgccaggctctggggcttactgggagctgttgcttgtggcgctggggcaccatgagaacagtagtatggatccctgtgggatattaagggagctgagatcctcaagccctacaaaatgtttcctgcaggacatgggaaaaaagaatcaaaggtcgtctagtccaactttctcctctacagattgtgaaagcgaggtgggaagtaatttacccaggctcatacaagccagtagaagactcaggcttcctctccccaaattcagggcattctccactccaaggcctgtgtgtagaacacgtgggttacaaaggcttgtgggaaaagctaccaatggaaactaccccccttaccaccatcaccgtggcctagcttggtgtctgttcccctgggctctttccttaagcatgaacatccatcaccctcctaacccccaggtggtgtcagcaaaagcacaacatctggggaggagctagtagtccaggttcccgtagtggatgtgcaaagcaacaacttcaaggagatgtggccatccctcctgctagccataaagacagctaatttcgtggctgtggacacggtgagagttgggaaacaaggagggcaggtggttgtgaaggggctggtgctagaggcctgtcacaactctccctttacctacccacaggagctgagtgggcttggggacaggaagagtttgctgaaccagtaagtataagcccttttctctttagtgccagccctcaactgtggagtrggggggtcacagacctgggtggtttgggtccttcataaggctaactcctagccacagcaacccccatacccaaccccaaggtgcattgaggaacgttacaaggccgtgtgtcatgctgccaggacccgttctatcctttccctgggcctcgcctgcttcaagcggcagccagacaaggtatgagctgatctcaccccaatcctaggtgtggctgtggggtggagggtagagagattctagggaacatcagataggaagcatttctctcccaaatctttttttttgacttgatagtttttttttttttatttgaataggtttatggggaacaggtggtgtttggttaaatgagtaagttctttagtggcaatttctgagattttggtgcacctatcacccagtgtacactgtgcccaatgcgtagtcttttatccctcacctgcctccatcctttcccccctgagtccccagagtccattgtatcattcttaagcttttgcatcctcctagcttggctctctgaaatcttgatatagcagacttctctttctcccagggtgaacattcctatctggctcaagtgttcaatctcactctgctgtgcatggaggagtatgtcatagaaccaaagtctgtgcagttcctgatacagcatggcttcaacttcaaccagcagtatgcccaaggcatcccctaccataagggcaatgacaaggtaggcctctagcctccctagccttgagtctgccctttctgtgactttatttcttcctaccctaggctggatgtctggggagaatctgcttcttagggagtatggggaatcactagtgacagggcttgggaaacaagactggtatgaggagggtgggcagcattgggtaaggtagagagagagcgttccaagtggggaagtctgggataagtgcccagcagaagaggctccctgggggactctgtcctcctcattgacccctttactttcatctagggtgatgagagccagagccagtcagtacggaccctattcctggagctaatccgagcccgccggcccctggtgctacacaatggccttatagacttggtgttcctgtaccagaacttytatgcacacctccctgagagtctgggaaccttcaccgctgacctgtgtgagatgttcccagcaggcatttatgacaccaaatatgctgctgagtttcatgcccgtttcgtggcctcctacttagaatatgccttccggaaatggtgaggaaatggttgagggaaaggggtggggcctgatacgagtttatttcattcacttaagatatttattgagctcctaccatgtgcccaggcagtgttttaggtgctgaggattcagcagtgaacaaaacagaccacaaaaccctgctcttatggagcttatatgctagtggaccattaccctcttgcgctgttgcagtgaacgggaaaatgggaagcagcgggcagctggcagcccacaccttaccctggagttctgcaactatccttccagcatgagggaccatattgattaccgctgctgcctgcccccagcaacccaccgtcctcatcccaccagcatctgtgacaacttctcggtgagagcacccacctgtttcttgggagggaaggttctgatgcctggagcctctttctaagcctctttcccacccctaggcttatggctggtgccccctgggaccacagtgtcctcagtctcacgatattgaccttatcattgacactgatgaggctgcggcagaggacaagcggcgacggcgacgacgtagggaaaaacggaagagggctttattgaacctaccggggacacagacctctggggaagctaaggatggtcctcccaagaagcaggtctgtggggatagcatcaagcctgaagaaaccgagcaggaggtggctgccgatgaaactaggaacctgcctcactccaagcaaggcaacaaaaatgacttagagatggggattaaggcagcaaggcctgaaatagctgatagagctacctcagaagtgccagggagccaagccagtcctaacccagtgcctggggatggattgcaccgggctggttttgatgcctttatgacaggttatgtgatggcctatgtggaagtgagccagggaccgcagccctgcagctctggaccctggctccctgaatgccacaataaggtatatttgagtggcaaagctgtacccctcacagtggccaagagccagttctctcgttcctccaaagcccacaatcagaagatgaagctcacttggggcagtagctgatgcaacttccaccttgctctcaggtggaacagaggtattttgggtctctctagcctgaaatgtcatcctcaactgctactgagtttaggggagggggaatgtcttgacagacatcactgcattgccctggaccgcctcctttatcccagtgtttgaggtacaagtaagaaggctgaccagcacctgtaacactgactttatttttaagtctgaaaatgtcttgggaaagttttacaaaaaaaaaaatcaacagaagcaagttatgaaaatatttgaccagcttcatctttggttatttcttattgcagctctgtaaggacagactgttcccaaagctccagccatggcaggaagggaagcaaatcagtccctgtataaaccatttaaccaattgaatgtatcacatgttgataaatacatagaagcaggccctagggcctacaaaaccagccccactcccaaccacaaggttgaaagtcttatggggcagaacattaagactcctttataaatatgaaaatagattaatcaacaggaaaaggtctttgaataggttagctaagagccatgaccaccacgctgccttgctgtccccttgcatagaaatgtagtgacgtggtctgaccatgcagtaagtgcaaacagcaattactcaaatgtcttagaatactggcaagaagcaccccaatattcaggtctgggaaacagccatgaccattacggcctcttgatcagctccatgttccactcagtagcttatatgccccaagaaaaggcaagagacagacctggggtggggaaagaaccggggtaatagctgcctgccagctcagcctagaactagacatcctctggtcctatctggggaagtacactggagagggtctggtgggaggcagacctccttgctggatttcagaggcttggtatcagctgttggccctaactaggaaggcctctcactgctgcctcccgtcatacacagccaatgggcactgggagcccagaagttgagcctggcttggcctagcctgcctgctctgtaggctccagggaagaatcaaggctgtgcacctagggggccatatggtttcagctgaaggtccatccccaaggtgaggcagggactaaaccccctcacccatcctgctttccctgggtttgcaggcctatgcctgaggtggagaaggtggctggagttgagcctgctggcctttcttctacctccatctcctcagaagcacccgcagggcatggactggtcccctggggcctggacccaaaaccattttcttcctggagaatggagcagtccatagcctcatgggcttgagcagctggtagggcagatgcccggaatggtgggatctctttaactctgtacttgagactacttaggcgtggtgggggcccatcagatagcgattcttcccggcccacaaatggacaagcctcttgatgcaagaactcaggcgaaccaggcaaggaacgccaccggcgaataggtggggccaggggctcctgccagtcagccaggggcatagttccgggccctggtgcatccaggtcaaataccagagagatgacagacttgctgggcaggtcaaaaaacttgatcttgccccccatgaggtcctggcgagcactaaaagggttgactttgggggtgcgggcagcaccatctcgtggccggtagtatgggtccaagacactcactgtacgtgggggcttacgggaaaagatatctgactggcttcgagacagccagatggtacgtcttgggcatggtgacttgtgggggatcttgtcatccagtgagcttagtcgcttcaccccaggtgctttctccaagagtcctgaagaataatcaagtctgggttactctcactagtcataacaaatacaagcagcattttaccacagaatgttttcactcatgaaagcaaagctgataccatggccctgttttaccaatgaagaaacagactcagagaggggaagcagtatgccaagccacagctcttaaaaaggccagtactttctgcatcatctccttcccctcccatttgtttctggacctgggatcctggcaatcacaaccctaagaggagaaggccccacatccgaatttcctcccttagggttaggttgggctccctggtctaatctcttacccctggctgtgggctgcagcttcctatccctctcctgctcttcttcctgtaggcggctcagaatttcctccagggtcttcccaatctccacaaaagatgggcgcagtttgggatccatctgtaggtatccacaacagccatgagctctgccctccatctcccaccccaaagatggcatttgagtctatttctggcatctttgaagattcagatgtgcagctgagagaccttttctaaaggccccagacaatgaaggtgatccctacagttcaggtcagggaaaacactactgtctactaccctccctgtcttagtgtttgtcttatcaccttgtcacagaaccttccaaaagtatgctcatattagtttattctgttcttgagttctgctcctaatgtgtttctgggaggtatctgaacaaagcccacctaccccttgatcctaacaggtaaggtccagccccagagctacatacatgaaggccaagaagagcctttctcatatgcctcaggaccagttggatccacagtccaacaataaaaccggaccagagttccatcaacacctaacgcaaggagtgatgggtctaccctacaggttgaggaccagataatacaaaacaacttctttctttcctttgtccagagctctgaataggttagctgccagagggaggaggaggaggtgtggttgctgtcactacagtgaaaatgaggtccctcatgaagctaattagcagcctctctgtacagtcctaaccaggtgaaaagggttcagccagcccctgatgaaaggcagagggagaaagacactcacgttacagcagttgaaagtaagttgcagaaaatctgggggacagtctcccaccatgtgctggaaagcatcatagtccagcccgaaattctgtggatgggtatggaaagcataggtagacagttcattaatccccccacccatcctagcctgctcagtagaagtggttgggagctgcccctgacaaccagcaacagagagttccagcaagtccatcccagggacagaacagttccattgcttcaaactagccccatcagtggcaatgatccccatgcttgcagctcacctctgtgcggggaagatagtccggatcggcctggatgcgggcgatgatctcgcagaggatgataccataagagaacacatctgcctggtgggtagtcggactttggtttccctcttaatgggttgaggggtagggtatctgcccctgcccctgcctcccctgcaccccaccatctaacagcccaggcctgggccatattgcccatacttcatcccagtcagtcactgggcagctgccaggtaccaccactgctcttggtaggaacatcttggacactctgctaagagtggattctagggagaatcagccgagcgcgatggctcatgcctgtaatcccagcacttcaagaggccgaggtgggcagatcacttcaggtcaggagtctgagaccagcctggccaatatggtgaaaccctgtctctactaaaaataaaaaaattagctgggcgtggtggtgcatgcctgtaattccagctacttgggaagctgaggcaggagaatagcttgaactcgggaggcagtaagccgagatcgtgccactgcattccagcctgagcaacatagtgagaccatctcaaaaaaaagaaaaagaaaaaaggagaatcaggccttgagatcctccaaacttaccttttcattatagggctcatctcggagaacctcaggtgccatccagaatggggaacccaccacggccagcttctcactccccatgctgtggggtgagattatacagaaaatgagcttgccaatggctggtgcaatggaatcttttgaccattcctccacctcaaggatgggtacagacgaggactaaacaaatttagggagctgaggttgagctgtgaccaagtcctggcctctggggaggaggctagaattttcccttagcttcagccccctgtcccttggaccccagcatccagtagggctacacacctgacatcggggatcttctcagccaggccaaagtcagctaccactgcagagtaaccattctcatccctctttatcaggcagttctagggttcccaggaaggaagagaaaataatgtggctcagaagcggggatcagccatagagttaccacccattccccccttcctatcacagggcaccttgtcctctgctccttggtgaaccgcactcaagctgaccccactggtcaggtcaggggctctaagacagccaggtgagatgagttagtcctgggtcttgggtggctgtcctaggatacacttcacattccaaacacaattactcatctttgctttctaagtgctaggcataattttaagtgctagaaatagctagatgaaaacaaccaaaacccttgtcctcttggagcttgcaatataggggagaacaacagactatcaggcccctggcctcccttcctccttcctcagaaacacagacccaaagcccaggcctgaccttgccaacttgatataagcacaagacaagtgtctaagccttcactaaccttcactgtccacaagatcacaaccaacctcttctctggcattaaaagtctatgatctggctttatccaactggcctagccgctgtccccctgttcctggtgcccctatgcacatatcctcatccaaacttgtcacagacaagcttgacttaccaaacctgaacaggtccttcaagcctttgcctttgcttacattgttccctttcatttgaaatattctcccaattatccttttcacctaagaaaattttgtattttaaggcaagctacctttttagccatgacctcatctttctccctctcatctcaactcttagctcctcctctatgccactcctcttacagtctagcagaaaagctatgaacccctcaggagcaagttctggtttgccttccttcctcacagctttcaattcatgagacaggctgagaacatgctcactgaaaaaatgctgtcttcaggtcaacccaagtgacctgtaaataaacaaaaagcggcaaccagctctccccaaatagctgctttcaaaatagccctacactgctctggctcaagaggcacctcaccccacccgcttccttcagaatagcagagagcagggatccttggctcacagaaacacttctggagccagcaaggccccatctgacccaaaccagccctccctcttccttgccagccttggtatctagttgctaagacatgccaagtcacctcctgcttactcctgtcaggtacaaatcaatcccttactctggccttgacatgattacactatttcccttccccaagctggaaggagccgtgatttcatcacttctaccctggatcacaggtagacatgcctcatctctggcttccaggaaggacagttcttgtgcttgtcctggctttggctctctaatcagtcctgctggctcagcactcgcagctccctgactttgactgtctgtgagaagatgggccctaggccagcctgcctattagccaaagccccagctatagggcaccagcctgtgaggcagtggcagctcagatatgtcacctatgtctcttccctcctagaagacttttgagtgaggtagccctgcctacactaagcagtaagagaggaccagtcagatttccctgaggcaagaggtgaccttttcagtttcagaaaacagcccaggcactgttgctgcctggttcccattcttcatttcctcacacctattatatcacactgcaacagtgacttacatgtttgcctcttcactggcaaggaatgatttcatttgcctctgtatctgtaacctagcacaggtacccagaaggagcttggcaaaagtgtgttaaatgaaagtttagtctgatgactgaagcaactgggcttcttttaaaagcatgtgtcaagctgggtgtgatggctcatgcctgtaattccagcactttggaaggccaaggcacgtggatcacctgaggtcaggagttcgagaccagcttggccaacatggtgaaaccctgtctctactaaaaatacaaaaattagccaggtgcagtggcaggcacctgtaatcccagctactcaggaggctgaggcaggagaatcacttgaatccgggaggcagaggttgcagtgagccaagatcacaccactgcactccagcctgggtgacagtgagactctgtctcaaaaattaaaattaaaaaaagcgtgtgtcaaacgtatacaataatcatacattccactctccatagtgaggactgagctgacaagagactcaaaagggtggccatggatgcatttcctggaaacctacacaaattcttcagaactgggccagatcagacacctgaaagtgcctgaggtgtcctggaacagctgcacagtcagtattaacactgaataaagccacctgagtgaagaaatgccaagtctattaactcatgttcactctaaagctgtttctgcaacaaaaacaacaaaacactttctatgtggcttcacctctttcccctcacccgcaacaaactgactccctaaacccagttaggatcaggcaggaaaagactaa

SEQ ID NO: 96785 - DNA, 12617 bp, Homo sapiens
aataaaaagtaaagtaattaattcccccatgtatgtaaatgttcttgtgatgcagaaaacccaagtccacaggtccaccaaagtgtggctgctgcttgggctccgtctgtcaacaggtggtttcctaatccacagttatcaaagtacggctgccaccttgtggggatgtgaggaacgggccgctaactaagagaagagcaacgggctgctgcatgccacacatcctgctgctccgaactggcccaaactcaggagtgggccgtggactggggctggggccggggagccgcgctcaccttgacctgctcattcgaggtgacagcacagaagacaatctccgtgaagccctgggtgggaaacatgcggaagcagatgccaccgatgacccgcccatccttgatcaaggccagagtcttgtgcttcctaagagagaggggggcatgtcatagcccctgactgtccccttcaggtccccagagccctggaagtctgagctgtagtcagggttgggcagtgagaagtaagaatgctcaaaggatgaacctcagaagtggggagcaggggatccccaattttgaggagtgaagaggccgaggaggaagggaactgggtgtgctgccctgggggaggggctctctgggggacgcacgggtcaaagacgaggcgggcgatatactccttaggcatgcgcggcagctggtgggaaaagacattctgcagccccacgagccacagcaacacccgccggttggccttgggcgtcagtgagttgccgatgacatggaactcgatgatgccgcggcgctcctccaggcgggctgtctcatcccgggccgcattggccgaaagcaggctcgtctgggcacagaagaggggtggtgagccggggtctcaggttggtgggggtcccccaactggtcagcaggtcgggctgcccacctcaggccccagcatggcagcagggtcagtgatggtcagcatgacctcattgaccagctccatggggatgtcacccatcacacggagccgcttggcatcctccagggtcaggttctctgggagcgtcctcttctcgcctattggggaggcaggcaaggttgctcaggatcagtaaaaaaggtttgggaaggagtgaatgagggtcagaggtcaggggtcaagtatccacctggcataggctcggcccctgcagaatccagactcagggagctgttgctgcccccacccatgctggggctgaagatgggggtgctgggaacaaccgctgcactgactgaagctgagagagagagagagaagtcagggatggggggctgaagctgaggagagagagagagaagtcagggacgggggctgaagctgaggagagagagtcagggacgggggtgctgaagctgaggagagagagagagaaggcagggactgggggggctgaagccggtggcaggtccctcagtgggatccagggcctccggcccaggtgagctctcttccacccaggaggcttagctcagccaggcaggccagacaccctacagagcgtaccatggcacatacctggccggggaaccagctgtgtcccctctgagggtggcatggtgaagcctgactcccagattggagagtttgccccatagatctcctcctccagcatggacaggaatctgtagggaggacacagtctgtcccacaactctgttctccagggtgcagcctgggccaggcagcagagggactggaggctggtcagagacagaccctgctcttagggaactggggacctgagagaggggacagcccctgtcttctgggagcctccaattgaaggtaagaggacaggacacatccaggacagagatcaaacaggctcagtttcaccacgctgtgtggcacagggagacaggtctgagctgatgtcatcctgtgctgtgtggccaggcagggcaccttgtcaccctgagccccctcactgccctcagtatcaaaatgggctcagactccaccccaccttgccatctcttgttcccacctgatggcagggggcactagagagccaggattagtcagtcagggttttttgaacaggggagttatggcctagattttaaaaggtgtggccgaacagaagaaaatggtacagaaaagaccagaacaggagtagaaattggtttcacttcaagcttaaggtctggtttcttggagagttgtgcagggaaggagtctgaggctgtgtccaggcccccatgggaaacaattagtaacatctactggggcgtagggtcgggtgggggcagcgttagcttgggctatgtacctgccatccccagactagtactagcaagttgcttctgggccatgggcaagtctgccaggtagacgcccagatcccaaaaggcccatggagggagaggagggaccaatccaggaagccttcctggaaaaaaggggacaacagggaggatgtgaacttggggccaaatcctggtaggccagaaggagccttacttggggaagtgagtgaggatgagggtcctcttctcgggcaccaatttgtccttctccactcggaacttttccagcagctgccggcgggtaacggtgaaaatggaccggagaaggcttcgcccaaagacatgagtggtttcgtagcgggggaggctatcacagctctggggcacgtggcagtaacagagccatctggagtagggggtcgagggggagacaggtgagggcggaaaccactgaacccaggctgggcctgcaagcctcccccgaagctgcccctggctgggcctacctggtgtaattgaccttgtaggtagccacgtcctcagcctgagacctctgccgaaactgggcaggtgtctcaagcttccagtagttaaggcagagcaagaacatctttgagagctcgaacatcgtctgccgctcccggggagccaggtgactaaacttgtactgcacaaagttcagcacaccctgagaaggggtgggtgggggataaaaccaggaatgaggtgtgagcagcccgcagggccttcttagacaaaggaagatgctccctggccagggacaaggttctccttctcctctctctctcgggtgctctctatagaaaagctctgccccctccctaccaccatgcccaccctgaggttagcacaaaacacccttccttctctgaacctccccagtgttctcagcttgaggagaatggagaacacaggctccccactcctccaagctgtccccaattctcctatccgctatctccaattcccctatctcacctgctcaatattaggtttctcaaatggagggctgcccagggacccctccaccacaggccgggtcatctgcaggatgcatttccgcagtagctagagagaagaggaagggggcatagaggggaggggggcagagctgcagacaacccctcaaggccccacctccttcactcacaccctcctttagtggaagctcaccttgaagaggtagaaatagacctgcttggtgtctgtgtcctcttccttgtgaacagacatgaagagattctccacatccaccaccatccccagcagtcggtttatctcatcctctgacacattctccaagtgggatacgtggtcagctgcaagacagatggcagagttaggaaaaattgatagaagaaatcaacaaggcttcttgaccctcttcacagccaagcaagatacacactctgttcctccaaccagtgtgaccaacagtgagactgactgctccgatatcaaccgttgggttgcctgggcctgttctgggctgagagatttcctttctccccccttggtgcacacccccccccaacccaatccctccttcgaggcatctttgattttttcagagatgaagctttgtggcacttgtcaccctgtccaagcaggacccagcacctgcccccagctccaagggcgctgcctgccttacccaaggggtgctcacaactgcggcacagctcactcaggttggcagctggctgctgcagatccatgcggggtgcagtggggggcttggggtttttccagccattacacttacaggtttcattggcctggaggtggaaggatcagtcaatgacctatacctctggggcaagagccgctccgcagccagagctttgaccccattcccaccagagccctgggatgccccaagccccgccccttcaccccaggccccgcccccaccttgcaagccgagaagacccctagcttctcaagcttcttggcgcgcggcagcccccggacttgcgccttcctctgactggcgcgctgctgctggctcaggccaggtcgagccggatcccccccgctcccggcccccccacttcctaccccgggccccccagtccctgtgctgccggctggggctgcagctggggcaggggctggtgccggggtgggagtcggaatcggggctgaagccgggctgggtgcaggagtcggagttggggcaggggctggggactgaaggggccggggctgcgcagccggggccggggtcggggcctgggaaggttccgccatggcctcccccgcagcggagagcggcgccgcgctcccagccctagggccgcatgggcaaccagcgctcagtgcgcaggcgttgctgcgcggcgcatgacgggagttgtagtcttcccgcgccttcccctcactgcctccagcttccagacttttctgtcctgtctcttggcccctgacagccaagtgaggcctgagtgaaggccccacattgacccctcttcacttgtaatctcttttaatggagtccgggagagtcacgatggctgtcctcttggggacaaggagtcttggggagaatcgtggggtctgcctctttcacgcgcctgtctcccacttaaccccctcccccaactcccgcacaggccctgccccacgcggctccggacacggaattgcagctgcggtagagatgagatgtagcaacagttctgcagtagtgtggtggtgacttgggtgtgttctcctcctgacattcacctgcacctttttctgcgcttttcagtatgtatgtatttaatagtatcactcaacaaaaaggagtttatcaggccgggtggctggctcacgcgggaggagagcttgagccctgcaggagttcgagaccaggctgggcaacattgggagaccccccccaccaatctctacaaaaaaataaaaaataaagtttataggctgggcgaggtggctcacgcctgtaatctcagcactttgggaggccgagatgggaggatcgcttgagcccaggagttcgagattaacctgggcaacataatgataccctgtctcttaaaaaaaaaaaattatcaaataacagcaccagaggcatagctgtggttatgatggtcaccaagaaggctactgacgtggagggtgaggcggaggagggctaggtctttctctgtgcactgggagccactctcctgaagccccaactgcgtcttcatctttgtggccccagagcccagaccacagcctgcagcacaggacgccccgggaagaattaatgcagccggagagaccagtccacctcctcgtgtcgcgtgtccgcgtggggttgtgggtggtcagggagaggtagggtggatgacccaggaaggccgccctcccctggctctgtctaggaacaatccttgccccaggcctggtccttagaaggcaagacagcccccttccagctgggggatcaatctgctgttggctgcgccagggtgcggctccctcgggtctggcctggtcgtggatccagttccttcacagctgcggcctccccgggtccattaacgaaggtggggaagggcggagaaagggtcggagtctgggaggagagcagctgcgggcgcgccagggcgctgacagtctggctcttggaggtaagatgggcgtggctgatcccgaactccgcctgcgtttgcagaagcgaagggaaccgagcgagcggagctgagctcgggtaggccgcgcgaggtccctcctctccgggcgtccgtgcgcctagctctgcgctgggagcctcgcgccctttgacagcagttagttgctgactcggatgcmgagagtcggtaacacctyctccaacgagagccgggtggcatcccggtgtcccagcgtgggccttgctgaacggaaccgggtggccrcaatgccggtgcggctgctcagggacagtccagcggctcaggaggacaatgaccatgccagagacggtttccaaatgaagctggatgcccacggcttcgccccggaggaactggtggtgcaggtggatggccaatggctgatggtgaccggacagyagcaactggacgtcagggacccggaaagggtcagttaccgcatgtcacagaasgtgcaccggaaaatgctmccgtccaacctgagtcctaccgccatgacctgctgcctgaccccctccgggcagctgtgggtcagaggccagtgtgtggcgctggccctccctgaagcccaaacaggaccgtccccgagactcgggagcctcggctctaaggcttccaacctgacccggtaaacaaacgacgcgatgtgcagcagccttggtgtccgttgtcttttctggggatggaagtcagaggtagagggactggaggcacaggaggcaggaaaggcaccctcaaggtggtggtccaccaagaatcaggcctctgcgggcagatcacttgaggccaggagttcgagaccagcctggccaacatggtgaaaccccatctctactaaaaacacaaaaattaggcgtggtggtgtgtgcttgtaatcccagctgctcgggaggctgagcaagagaatcgtttgaacctgggaggtggagggaggttgcagtgagccaagatcctgccactgcactccagcctgggccacagagtgagactctgtctcaaaaaaaaaaaaaaaaaaaaaaaaaaaaatgctgggcgcggtggctcacgcctgtaatcccagcactttgggaggccgaggcgggcgaatcacaaggtcaggagatcgagaccatcctggctaacacggtaaaaccccgtctctactaaaaatacaaaaaaattagccgggcgtggtggtgggcgcccgtagtcccagctactcgggaggctgaggcaggagaatggcgtgaacccgggaggcagagcttgcagtgagccgagatcgtgccactgcactccagcctgggcaatagagtgagactccgtttcaaaaaaaaaaaaaaaaaaaaaaaaaaaagccgcctgtggtagctcacgcctgtaatcccagcactttgggaggctgaggcgggtggatcacttgaggccaggagtttgagacaagcctggccaacatggtgaaaccctgtctctactaaaaatacaaaaattagcagggcgtggtggcgggtgcccgtaattccagctacttgggaggctaaggcagaagaatcgcttgaacccaggaggtggaggctgcagtgagttgagatagcaccactgcactccagcctgggtaacagagactccgtctcaaaaaaagaaaaaaaaaaaaaaaagggaatcaggcctctgtggccctgggagaaattggaggagagtgtggccctagctgagcagcagctccaacaggtagcagcagagagctgagtgcccagacctgattccagaaccagtagagagctggactggggcaacttggatgtggtgtgggggggtgacgtggacagaggtggtgaggaaagccagtggctacagtcttggccttaagaccagtccagcgttccaggggctgttgggattccttcctcttcaggaagagagaggatccagaccctctcactggtaaagaccaaccaaaaaaacccaaagaggttgtttctggtgtttcagagactaatgatcatcaaatacacactgcatgtcaccccagtatgatctggtaggtgggggaggggaagggaggtggagaagtgaacacgggccctgaaacttcaaacttggtcagcccaggtcagctacctcatcggagctgctaacagtaagagcctctttctcttggttaccatgaccaccagcatcccctcacattagaggggaagattttgtttaacaagattcagtggttcattttaaatcaacttcaactacagagggcactgtctgataaactgccagagaaagacaaggaagacaattgtgaggtcgatcgatcggctgactatattgacaagatactgattggttacatgttgaagaaaacatacaatacaaaatacagaaaaagttggttccgtcccctcccactcccccccttacccacccacccccaaatactcatcatcatgatttggtcagaacagggctcagagccagaggttggggtgaccgagggtggaggggttgtgggcaatgggttcgtggctgtcacaataatgctgtgataatgctgtggtttcccagcagggaggtgggagcggggagggggctgcagcctgatgagagccagctgaaggaagagctgcctctcccttcctaagccccttcccaaggtctgccccaccgcccaaaccaaagaccactccgaacaaagtgaggatgtggatgctcttgctgggtccgctgttccgcaggagggaaagaaagggtagctgcactgaccccactgtccccatatacaagggttggggggcaagagcatgtggctactcccagcaagggaaaatgggagagcagtagaaaggggaggaagtgggaagagcagaagatcatatatattaaaaaagtgacttaagacttaaaattgaattagtatttgtacagaaaggtgcaggtggaatgactcactccggcctatgatcaaaattatatggagaaatcatggtggacccctccccctgcccccccagtggtggcccgagtcgttaagtgcgattggttagagtggattccagtcgggtcattcaggcggaggaggcgggggcagcgggcaggcaaggggggctcagttgctgcagcactggctccggctggctgggttgttctcctggaggtccacacctcggtttcggcctggagcaccagttgcattctggggctcgttcttgggaagcttcttagctgtttgggagggggaaaagtgcatttgttgggggtaccccaataactctcccagttccactggagcagattctggcctttatacccaatcagtggtaactcacatattgagggcttctgtgtgtcaggtgcattctgattgttttcaggaaactgcggcaaagtaaggttaaataacttgcccaagactacagagctaatgagtggtagagccaggatctgcaacccaggaaggaagattccagagccaaatgagctaaaaactcctaggcagtgggtaggggtagtgatggcaggctctgaaatgggtggcaggctacaggctcagagagtgaaatgttgagactctggcccaggcttcaggaacttctcgggtgaacaaccaacatctacatctgggagtcaggtgatgatgaaaacaattttatcagaaggttaaaagtggtgaagggggctgggcgcagtggcttacgctcgtaatcccagcactttgggaggccgaggcgggtggatcacgaggtcaggagatcgagaccatcctggctaacaccgtgaaaccccgtctctaccaaaaatacaaaaaattagctgggagtggtggtgggtaccagtagtcccagctgctcgagaggctgaggcaggagaatggcgtgaacctggggggcggagcttgcagtgagtcgagatcgtgccactgaactccagcctgggtgatagagcgagactccatctcaaaaaaaaaaaaaaaaaaaaaaaaaaagagtggtgaagggaccccgcaggcccactctagaccagcagacaggtgatatgcccttgctgtggtggagagaggaggggaggagaagcaactgacctattgccatgaagatttcgttcacgttcattgcagtctttgctgatgtctccatgaacagcaaactgttgtcgtctgcataggcttgtgcttcctggtttggatggaggtgagaggaggtgagagggaaatgttggcaggggccagggcccagggcccaggatacaaaccttccttattcgagcaccttatcataatagagatcagctggacacacacaggagttttcaggcctaaggctgccctgatctgggtttccccgctcatgtatatcacctctcagctcacaatcactagcagatgtcttacccgggtttccccaggtccaccctgccttcttgctcttcaaaatcactaggctaggaaatacttctagaaagttaacctacaaatacacttacatgtttgcacaaaagcacaaaagtatgtggatgtctactgcagcactgttttcagtcttttgctattattagggattggtaaaaaattatcatatacagtatgtatagcacactgccatcaatgtaaagaaagggattaaaaaacacgtgcatatttctggaaggacaagaaactggggaaattagaagaagagaagttgagtttctagggttagcagagacttaagtatttctttctcaataagtttaattaaaaagtcaacttacaagaaaagagaagtagaaggctagtgatccatatatacacatacccctaccaccaaagaaagagaaccagggagagacaggtgacgggcaattccttttaggcccatgctttttttattcttttcttttttttttttttgagacaggatctcactgtgttgcccaggctggagtgcagtggcacgatcactgctcactgcagcctcaatctcctggcctctaatgatcctccccacctcggcctcctgagtagcacaccaccatgcccagctaacttttgtatttttttagacatggggtttcgccacattgcccatgctggtctcgaactcctaagctcaagtgatctcccgcctcagcctgcagagtattgggattacaggtgtgtgccaccacacctggctgttttttttttttttttaaagagatggggcctcactcttgctcaggctggagtgcagtgttgcaatcactgcaatcttaaactcctgggctcaaacaatcctcgtgcctcagcctcctgagcagctgagactacaggtgcgtgccaccaagcccagctaatttttaaatcttttgcagagacagagtcttactgtgtcgcctaggctggtctcgaactcctggcctcaagtgatcctcccactccagcctcccaaggcactgggattacagacaggagccatgttaggcccatgcctgaggcacgagaggacagcagatggaagcttccctgttgcctcctagcatggcccttcccaaagcccctgagcatcccaggcgaggccggggggagctgcttactccactccttcccccaagtctgtcatctccccacctggaattccacggctctcttgctggccaggtctgccttgttacccgcgagtgcaatgacgatgttggggctggcctgcctctgtagctccttcacccagttcttggcccgtgcaaatgtatcctgaggagacagggacagaatgtcgaagggacagagaaggcattctgcccagggccacccattagagactctcaagctggcacagccaaattatctaagacattgccacctaaagattctgatgcaatgtccccaaacaggaaatctgcccaccccccacccaggaacagagggttaagcggcctgaaatcagggctctgataacccaatccctgggactttgagaagatgaagggcaaaggaagaagcaaggggaaatctttactgtgttggtgatgtcatagaccacgatggcagcctgggccccccgatagtacatgggggccaggctgtgataccgctcctgtccagctgtgtcccagatctcaaacttgactgttgtgtcatccaggcagacagtctgtgtgaggaaggccgctgtaagagagaaggagcgtccatgggcaagagcgagttggaatccaccccacacaatcccactgttgcttctaggctctggcactcagaagcccaccactgagatgggcacagagaaccctcaagccaggagccaaagcaggcctgagtggggggtggagtttggatttttatgtatgtgtctgggggacggggtctgcacaggctttgcagacccagcccaggcaacggcaggagaagggactcctgcatgcactgagccatctcaggaccactctctgaagagcaacacagcaggggcaagagagggaaagcctaggggaagcctactccaagcacagaagggtgagcgccctcagacctcctcctccgccactcagagaacagaccagcagctagggaccgctccacccctcagtttgctccagcccaggggtgtcactgaccttgggtttcctaaggacattctcacacacttagctatgctggggaagtacacactgttccaccaccaggctgaggctgggtggccggcttcccaaccacccctaccacctc

SEQ ID NO: 96786 - DNA, 14793 bp, Homo sapiens
ctgccctgtgcccttcagctgtgcctgctctgcagacaccccctcacggtggctacacagacgactcctgagaaaaatcctgttttgcacaactctgctggcgtgacccacatgcctccaggatcaagttcaggcccctaggagccgaaaggccctctggggtcagggcccagcctggccagatgggccctgtccagaatgagctggccctcccagcctgtcccccacagcacccctccatgcgtgtccgccacgggaccccatttggcccaggggtgcccgccgagcagggccgctgagccccgtgctgtgtccccagcgtccctgctgaagctgtggtaccgggagctggaggagcccctgatcccgcacgagttctacgagcagtgcatcgcgcactacgacagccccgaggcggcggtggccgtggtgcacgcgctgccccgcatcaaccgcatggtgctgtgctacctcatccgcttcctgcaggtacttccctccccgggggtccccgctgctttcccctccccgccccgcccccgcccctccgcgcccaccctcgctcctccaccaggtcttcgtgcagccggccaacgtcgcggtcaccaagatggatgtcagcaacctggccatggtgatggcgcccaactgcttgcgctgccagtccgacgacccgcgcgtcatcttcgagaacacccgcaaggagatgtccttcctgcgggtgctcatccagcacctggacaccagcttcatggagggtgtgctgtagcgggggcgcccggggacaggagggatgtcctgccgcccccagccaggccgaactccgcactcgctctcccggcagaggggccagaatcgcccggcccagccctggagccccctccactcccccaggcccctggccccggcgctccccacgtcttctgcctggtctgagggtgcagccagggcacagcagcggcggggagggcgcctctggccccccacctcacggccagttcccgcgggcaccgcctcgccctccgctggccgcgggtcagctccgagaaagtgccttctgtgtcctggagccgagcgacgctgcctccttggggccgggctgcctccctgtggctcctgcgcgccctggcctgggccttgcccagccgccccggtctctccttccctttctcctgtcctcgtcctggcctgcagctcttcccagccccgagagagcttcccgacctgtccccgcctcctctccctccctcggcccgtggtccccagctggtgactgctcaggagtttgggggctccaggacagtgggcccggggcctggcaggctctcggtgggtggggtgggggcccccaaaccaaagtcctctggggtagggagcagggctgggcaggcattctgggggcagggtgggggaggggcgagagtatttttttcttcgtgtaactgtaaatccagaatctatcctgcatcgcagcccaccgtgtatagagatataaatagagggaaagatataagaactaaatttgctaatgacatagttttaacctaaatgctatttatctctgagccgtccccgtcctccgtgcagagcaagttgaggtcattccttcttttcttctccgatcttttttcttggcttctgaccaaaaaccaagctctaccccatccccatcccagacctgcaggagacgagcgagcgggaaggcgccgggcccgggactgtccgttctcggggccagagctgctgggggaccgagtttgtacattttccattttggaattttgagttccaattgttgtaaaacttaatttctccccagtttttatatatatattttttagagttccgtttttatttattaaaaacaaaagccccagccctgccgaggcctgggcggcgtcctcagtcgggtggtcccggggcctttgcggtcccgcccggctgagacgctcgccccgacgcatggacccgagaggcgacgacacgagtgaataaagtgcacatggaccctgcgcgtcctcccgttccttgtgggcgcggccgggggcgggaagagacgcggggcggaccggaaggggcgtcaccggcacacgcctctcggaaggccagggcgggcgagcccccgaggcccgagggagagggaagagcgccgggcccgggtcgcggaggcgggcgccgccggaacgcgaagcgcggggctactgcgggcaggcgcgagttcgcgcagcaccgcccccggcgtgacctgctggtcgcttccggcgcgggaggagaatgtggccgccttgcgggacgctccggaccctggccttggcgcggtcgcggggagcccgggcctgcagcggggatgggggcgtttcctacacgcagggccagagtccggagccgcggacccgcgagtatttctactacgtggaccaccagggccaggtgggcgggggcagggctgttgctcgagaggcggggccgggagaggtctctgggcggggcgggggggcgtggccctgtgggcgggaccgttgctcgaggggcggggccggagggacgttccagggggtgggtgggcggggcctgcgcggtgggcaacctcgactcctcagagctggaggagagcgcgctggaaagacggggagttgggtcggtccgggccgaggctcctacatgggccgcgtccctgctgcgttgtgcagcttcggactctgtcctacaagtccccagccccggcgctgacttctcgccgctgccagggagacacccgggccgccctgcctttttttggaagccctgtcaaaaggcagctgcatgtccgggaggcagcaggccaggtagtctccgcggaggaggtggtacaactgattacaaacttgaaaagagggaaaaggtgcgggaaagaattggctgaccagggagcagaggtgcgcatagacgcggataagtcggcggggcccccaggtttacctttcacgcgcctccctgcatgcggtgtgcacagacaagcaggaaaagtgggctcgggccggttcaggacctcccgagcttcaggacctcctgagcttccccgcccccacctgcacgctgggacttatcacggcctggccctctatctgcagcttttcctggatgattccaaaatgaagaatttcatcacctgcttcaaaggtaatgctgtgcctccctctccagccccttctttctcccttccgggcagcccctgatgggctccccgactctgccgacgggcccagcgcaccaaggagtgggcgtcctgcgctcaggagccccgctgagtgaggccgggcgaacctcttaccgtcggcgcctgccctcggtatggtcctgggcccggaggccttgggagcccagcgcgctgagtacacgcacccttcatcccccagacccgcagttcctggtcaccttcttctcccgcctgagacccaaccgcagcgggcgctacgaggccgctttccccttcctctcgccctgcggcagagagcgcaacttcctgcgctgcgaggaccggccggtggtcttcacgcacctgctgaccgcggaccacgggcctccgcgcctctcctactgcggcggtggcgaggccctggccgtgcccttcgagccggcgcgcctgctgcccctggccgccaacgggcgcctgtaccacccggcgccggagcgtgcgggcggcgtgggcctggtgcgctccgccctggccttcgagctcagcgcctgcttcgagtacgggcccggcgcgcctgcgctgccctcgcacgtgcgctggcagggccgccgcctcgccctcaccatggacctggccccgctgctgctcgcggctcggtcgccctgagcggggccaagggaaaggcgggaggccgcgggcgcctctcgccccgctcccccgggactccacgccccggaaagcccgcgccacccgcgctcgcggcagcctagtgcgcctgcgcgctcggccccgcccccacccggcgctgtccttggtgctgccgcggcccggccctcccggacaccccgctccccacggcgcgcgccccccgcgcacccgactccggcgccctccggattggcctgcgctcgagacgtcaggcacaggcggcgggcgcggggctctggtgcgcgtgcgcgagcgtcccccgccccctcccagcccggcgactgctcgggcccggccgccacctgcacggcgggggagccgctcgccgcgggagcgtcaggtgaggggacgcccgacccaaggtcaccaggcgtgggggcgctgggggatcggggaccatcccggctctgaccctggtgcgctccgagaagggcgtgggtcctggagggggatggggaacgcggaggccacgccctccctgagcccggccgaaaatcaaccggctctcgtgggtagcagaggaggccgtgggggatacaggcaccaggtcgcagcgctgcagaggtgcgcaagggccgcccaaagaccagcttgggcctcgcactgcgcccgaggcagacacagggcgttccatcctcttccctccccgctcccgcacagaggggcgcccaggaggcagtgacagtcgtcgcggaatcctgcgtgtgacaccccgcccctgcccagcggattagggagttgtcctctggtaaaaggatttctgggctgcttccagcttggggccctcatccctgccctggcaggcctttctacaccgatctgcatctagtggggggtcagcgtgagcagcagcgccgtgagttctgaggccaagaaccttctccacttgagaagccttcctgggggaggctgagtgggccaggcctggagccacgtaccaacactttatacccaggggaatggatcccaagggcccagataacgcccccaacttcttggggttcacacgcgtcctgagacatctgggaactgcctctgcctgggccaaagctattccattaaaactttattgctgtgcttacttatttctagtgactttaaataatcatgtgagttacaatttagggcaagatttaaacaccaaggccacttggtcctgtccctttccacatgactcgaaaggaggaagagctgatggacaggcaaatgtttggggaggccggccagatgaggctgggagacaggacacctgcagccctgttttccctggcttcgggtgggctggctggcttagcccagatccctacttttaaaactgggctccttgttcctgaaaccagaccccagccttcccatttctttacgacaagtacatgtatatggtcccccagcaaactccctgctccttgctgatctcagaggtcacactgctcccagagcccacttgggaagccacaccagaaacccagttggtggcccaaggcgtcccctgtcccaccccagctttcccagggccccatctatccccaaagacaggacacctttctggggaccggcatgggaagcacagacccatggctcctgaaccgaatttcctattatttttctcatcccccaattctctgacaggttacctgagaaaaaggcccaattctagttaagctggtcccacccctaggccagcaggagcaggtgctggacaaagctgtgccttgacttccctggggctcgtagctcctctgaggccagctctgcccaggcccccacaggataacaaggaggcgtgtctgcccagggcctgctctccccctcctagccatgcttgggtaatgggaccccgggctttgtcacctaagcaaagttctcaagccataccctgtacttccagcttcttgcaccctagaaccaagcagcagccacttgcctgggggtagagtcgggggcagcaagcgacacacatccacgtcctgagcaggaagctcctgacctgctgggcatgggtggagaaggagaaggtgacagggttgggtggctctccctacatggtcacatcctgtgaagacactgaggacaccaggaattctaaatttgaacctgatgccccagagctttaagaaaatgtttttgtcaaaggagaaaaccagaacgttttattagtttcttgaacctatttatagygtcaaaagttagacgcaggtgcaggcctccattccatctattggctggctctcgactgccgagactggcctgccaacctgtgtttcaggagggcacgcgtctgcggctgaaccgcggaagggccggtgaggaaccgggcctcgggagatggccctgagggcccccgcactgctgccgctgctgctgctactactgccgctccgcgccgccggctgcccagcagcctgccgctgctacagcgccacggtggagtgtggcgccctgcggttgcgcgtcgtcccgctgggaatcccgccagggacgcaggtgggcaccgtgtggagctgcgggaggacggggtgcccccagggagaggaagacccccgcarcggggtaagcgcctcctctttccccggcctgcagacactgttcctgcaggacaacaacatcgcccgcctagagccgggagccctggcgccactcgccgctctgcgccggctctacctgcacaacaacagcctgcgcgccctggaggccggcgccttccgcgcgcagccgcgcctgctggagctggcgctcactagcaaccggctgcgcggcttgcgcagcggcgccttcgtaggcctggcccagctgcgcgtgctctacctggcgggcaaccagctggcgcggctgctggatttcaccttcttgcacctgccggtgagcgcctggggtctaaaggggcgggatactccattatggcccctcgccctgtagggctggaatagttagaaaaggcaacccagtctagcttggtaagaagagagacatgcccccaacctcggcgccctttttcctcacgatctgctgtccttacttcagcgactgcaggagcttcacctgcaagaaaacagcattgagctgctggaggaccaggctctagcggggctgkcctccctagcactgctggacctcagcaggaaccagctgggcaccatcagccgagaggccctgcagcccctggccagtctgcaagtcctgcgcctcacaggtacctcttcctckgaaagcgtctctgtctgggccacggtgttggcagtaggsagcaggctcatgtgtggaggggctctgacatcaggcaactgggcagcagtctggaaggctgcaccaccgcctgcagccacactggagggctgcgggagtgggtgtgctggggratacagctcaggcaccctgcctggggaaaacagaagacaggaactccacagggtgacttaacagaattgagggttctgcacacttttaggctgaggggaggcagacaaaattgcaaaggagagagacagctgaccaggactggggacattcccaagagagggcatccaaaggcaaggctgagargacttgtgaggtttcagtgctggtgagatgtctatgtggacgcccaggttcctaaaaacagtggcacttgttgcaggaagacttaaggagcaggtgctttctcagagaccgacggagaagtgatctgtaacaggcaggcatcacagagctaaaggggaggggggcgagggtgaagggcctgccgccccaaggagcttggggtcaaggaaggggtggcagggccttggactccgtgtgaaaacgctgtgggaggtgggaaagaggcctctgtcctggcctgcaaaaccccaactgcacaggctgttttagcagcaccctcaagccacctgcctaacgctgctctcccacagagaacccatggcgctgtgactgcgccctgcactggctgggkgcctggatcaaggagggcggccagcggctgctcacctccagggacaggaagatcatgtgtgcagagcccccgcgcctggcgctccagagtctcctggacgtatcccacagcagcctcatctgcattccgccctctgtccacgtgcagccgctggagctcacagccaacctgggtgaggacctgcgggttgcctgccaagcctccggctacccgcagccattggtgacctggagaaaggtgccccagcctcgcgagggccggccgcgagcccaggcccagctagaaggcgggttgctgggcctgggcggacactcggcatccgacacgggcagcggcatgctcttcctcagcaacatcacgctggcgcacgccggtaagtacgagtgcgaggcctccaacgccggcggcgctgcccgcgtgcccttccggctcctggtcaacgcgtcccggcagcagccgcagcagcccgcgcaaccgccgcctccggccgcccgccccgccggcagcgagccccggcccgaggcgggcagcatggccttccgcgccctgggcgtggccacacagacggccattgcggcggccatcgcgctgctggcgctcacggcgctgctcctggtcgccatgatctgtcgccggcgccgcaggcgaaaaaaggcgcgggggcctccgggggagggagcgctgttcgtcaacgactacttggacggcccctgtacgttcgcacagctagaggagctccgcgacgagcgcggccacgagatgttcgtcatcaaccgctccaagccgctcttcgccgagggtccggcggaggcgcccgctgactgcggcccggaacagggggcggggccgggactccgcgtgcccccgccggtcgcctacgagatccactgctagggccgcgggcgcgcggatgacgtgggcgccggagattggccggtgcggcctcgcgcatgctccgtcagtaaaggtggaagccgcgcagtgtgcgctgagccgtgtgtggggcgcgagccgggaacgttgcactcgggaatcctggggtagcaatggaaggtggccggggaggccccaacacctcccttgaagctcttccgaaaagacatcaccccaacctccagctctgcgtggggggggtccctcgctggccctggccggccacagtaggatcttgggcctccgaaaggtgggaagagcaaggactggccggcagtgccgacggggctgccccgcgaagggcggggcgacaggctggatggcagttgttgcccggtggccatgttgggggtgacagcagagataaggataagggtgaccaacgtggacagaaaaaaaaacagccacaaattcaacttccaggcacatgtgtaccttgatgaccccctccagcccgagcccagcccagtggggtggctgggtggcagggtagggaacacgtaagaggcgtgagtgcctggggactcccagcttccctgaagcaggcctctgtccaacttcaaccccagaagcactgagctctcagtaaagggagaggaaaggcccagagaggccatcatctctctcagctcacaactggaatcccaaagcatttgcacaaaggaccaggaccccagacggcagccaaatgcagccaaactgagcagggcaatggaggcctgacatccagccccggggcccacagatgatcagccaattatggagcaagtgcagggaaaaccgcgtggggcactgcagaaagcaggggaggcttgaggtgtgcccagaagcaaggtagacccagcaggaaaccagtaaccagtgcttttgtgaaggcctccaccaggggtcccagcaaaggccctgcctacctaaagagactgcagggcggcctgtgtctcacccagagctacttcatcataggctgaagtagtccgcagccagtcgcccgtagatgtccgtggtccagagcacatgggcacggcctgaggctagaagcagctggtgcaactcagcttctacgcgggcaaacttctcctcattgatggaggcctccagcaggacagaggcaggcggcggccagggcaagccctcatagcagtccacagggaaggggtgcaccacagtacgcagctcagcctgtgccactgagtcccgcagcagctccttgaggcccgccatggacagtgggttgccatagaggccaaggtaccggagactggcgcactgagtcaggatgggtagtgtggccaacagctgggtgtctgcgagctgacactcagtcagctccagatgcaacagtgtggctgctgatgcctgcaacagaccctggaagggtgccagctggctgccagacaggtcgttaccactcaggtccaacttcttgaggtgggcagcatgtgggctccgtgccaggaagcgtaggtcctcaggcagcagagcacagaaggccaactccaggctctccagggggctctgcagggtgctacaggggacacaggggtcacagacaggcagagccagggagggtccctacagaagggaggggcagggcagtggtggggcccgctcacctgagcagctggtccagcctccctgaaaggagagaggagcccatgctgagctcacgcagacaggtgaagcggcccatctgggcaaggaagtagcggaagttgtcctcgccatccacggagggctgccttgaatccccatgcacatagtggagccgcaggctggccaggtgctggaagcgggccacgtgtgggatgatcacagacaggccgcgcaggcccagattgttgaagcgcaggtccacgcggcgcaggcagcctgcatccagaagctgcagcagggccacagtgttgcgcatgggcaggtcctcagctcgcaggtcccggcagcagagccgcagcgggctgcccacgctgcttcggagtgcctcccgcaggaacgcataggaggcccggttcacccgcaggtccacgcgcacctccacggggatgggggctggcccaggctctgcggccccaccctgctgctgggcaatgcatgtgcgagctacggcagcagtacagtcccacatgctcatggtgccaggatcctgttccacaccatcatccaagaggcccgtcatgtccagcacccgcagcgcatgcttcctgggagtaggaatggtgtgaggaaggggtggaggggcagcgcccataccccctcccagccaccttgggacaggagcaacgcgcctgctcctgcatgagctcttgctaactttatgacccaagcctcctcaggggacccacttacacacccctggcctgacgaccctccagataagtccatacctgcagaggggctgtgtgctggccccaggctctgaggtgtggagccgggcagtcagccccaggataacagcctgcatgctctcagtgctaggccgctcctgcaggagggcacggctgcagtgggcacactcctgtagcagctgctggaaactgagcagcgggaagggccacgtgtgtaccaactcgcgcagtaccactgtcttcttgtccatgaaggccaccttgaacagcagggggaagagttcgcgtggcagcaggggcagggcctggcaggcagctggctggcactgcagcacctgccgtgtgctcaagaacacaagcgtgtgcatggtgctgggccgggcagacggccacctgcaggagagggacttcagcagggaggagagaccctaggccactaccaagccacacacaagtggtaggaaggcccagcatagtgcctgaaacaaagtcagcagttagcagtggccatggcacagagaagcacctattagatgcctagcgctgggctgggtgcagtgaactggcagacaaactcacaactcagccccagccctccagatgcacaggatctctttagagaaactaagcgtcaagcagtgtggcatcgtcaacaactcgcttgcttgggtatgcttttgacagatgcctgttgccttgcagggccccccatgggtacttcaggcctctcaaattacaaagctgcttcacaaaaccttcttcgaaacctgaataaagcccaggactctccccaccaaccttcatcagcattagtattgacgggacactctaaggagtcaagcagccaaatcacctttccttcccctctcctcacagatgctctccagggctacacttggactccacaaaacaccaaagagctggaagcacagaagcagcttcataagcaacaaggcaggttgaaaagaccgagacccagggaacaccgagtccagatgatgtagcctataaaatacaagcccccgcaaaagctactattctccagagcatcaccaagcacggagaccccgaaagaaagcaaccctcacctttgttggcccttaccactggcctaaacctctccctcttccctggagagccactgtggaaagaccaagtcttaagtatgtgggattcagaaggtgcaaagctacagactgctcagacaaggcaaagaaagctgcctcagcagcacccaagctgcagagatgcacaaacactcccaaggccacaaggtacctgtgacacagggtgccagccctgctgctgcctgtagcatcctcaaaactaaatcgcagccatctccctgtgacagattagaaaatgaaggcctcggcctggcccaaggtcacagcctgagtgacaagccagggaagggggccggggaagacactctggccccaaggcccttctttttgtcgacttttccacatacaagtaagtccttaaggcaccggttcctgaaaagtcccagacaccaaccctcggcctagttctgccggtggacagatctcaacgatcatactcgctctgacaggacagaccaaccgagcacttgtcacgggagaacaccaaagcagacggcctgcccaccaagggaggcaggcacctccgtgcgacgccccctcccctcccgccggccgcagggaacgcgacggtcctcggtcgcctgcgtttcgcgaagacgcccccgcccggctcctccgggcctcgagccgcgggaggcgctggaccctccgctctttcgcctcccgagcggggcctgctcctccaggtcggatgcgtctcccaccagggcctgacgccgctccgaccggcccggggactcccagtccttcccggcccgcggtggcacctcccaggctcccggcctcggccccgggctcccaaatgcagccactgcctccctcggccaggccgccccgagcgaccggtgccccgccccttgaggccaggcagggccaggggcgtgcgccgccccgctcagacacccccccggccgcccgcgctcaccggtcccgcaaccgcagccaccgcctccagccccgcctagaccgtccgccgctccccgcccggcgccgcggcgccccgcgatgacgttgacgcctcccattggctgcttgtccgaggcccgacggactggctgcccaggggcggtggccccgcccccggcccgccgcgcatccgcattggctgtcggcccccgcgacggctgcgcgggagattcgctggacgatcgcaagcgcggaggccgggcgggcgcgcgcgccatggagcggctgcgggacgtgcgggagcggctgcaggcgtgggagcgcgcgttccgacggcagcgcgggcggcgaccgagccaggtgcgggctgcccaggggccgaggggctgagggcgcggcccgcggctgacgcgttccctttacaggacgacgtggaggcggcgccggaggagacccgcggtgagcgcgcggcggggcggcgggggcgagaagacaccgggtcggcaggggcccaggccccaccctgaccccgcctcccgctcgcccacgcagcgctctaccgggagtaccgcactctgaagcgtaccacgggccaggccggcggcgggctccgcagctccgagtcgctccccgcggcggccgaagaggtacccaggccccgccgccccagcctcctcccacttccctgtttggcggagtggcgggagccacggagtcgcggccaggcctccgtggggcacagaacttgggagggggactgggcaaagtgaagaagggccgggcctcgctccaggtgcgggaggggtggctgggagcgcttctgccgccacaacagccttttctggcctgtgcccctgttgtctcctgcaggcgccagagccccgctgctgggggccccatctgaatcgggctgcgaccaagagtccacagcctacgccagggcggagccgccagggctcggtgccggactacgggcagcggctcaaggccaatctgaaaggcaccctgcaggtgaggagtgggcaggcagtgagtccacgctaggtccacagctgcttccggtccgggtcgccctcttgtcattttttccacacagacaggcacgggcccctgtgccaaccagggcacgagtcttcagggagcttctcggggccttcgcccttgactccctttctagtccagccttgtgctaattagcctgctctacaattgagcgtggggactcaggtaggttttagagtctacagtagctcaggggcctgagttcctcctgctgttctgttgttcccctcccaggccggaccagccctgggccgcagaccgtggcctctaggaagagcctcatctaaggcatccaccccaaagcccccaggtacagggcctgtcccctcctttgcagaaaaagtcagtgatgagcctccacagctccctgagccccagccaaggccaggccggctccagcatctgcaggcatccctgagccagcggctgggctccctagatcctggctggttacagcgatgtcacagtgaggtcccagattttctgggggcccccaaagcctgcaggcctgatctaggctcagaggaatcacaacttctgatccctggtgagtcggctgtccttggtcctggtgctggctcccagggcccagaggcttcagccttccaa

SEQ ID NO: 96787 - DNA, 13297 bp, Homo sapiens
actagccaggacacaggtccagtcacaagcctgtggctctgctcacccctggctgaaacactctggggctagtctatcaggccaggactctacatagaccttttagccttttacagtttcaccaggcacaataatgtatattttctttctatgagtgctacattagtagaaaatgattaaatcataatttattaactttgccaaggtaaatcatttcccatgccctggtaactcaaatatttttctcctctcttatctatatttatatacaataaagacgactgcagctgtaaagctacttggttaatcacttaaaacttctttttgaccatttccttcacaaacagtttgataaactttccatgggaaacagaagaaattagcaaagtgtacatctccctctcttgtttaccaacattcttttgaatcttacgaaagtaacatattgtattcaggccctcagctttctaaactgggtggcctagttctaagaaaaatagttctgtatgttaaatcactatataaacaatgttgtttaaagaatttaagtcaagagagagggatccctttcaaaacaagaactgaaaaagaatatttgaggagtccaaggaaaacaagactatacaattcacaggctcttttcagtcatctaatattgagtttatcttttaaaacatcatgtttttctgtttcccagagaatttaaacactttacaattctgtgatgtgcagattagtggctaaattgtactcttcccaagaagccatatcgttcttccttcccttactcatttttcatttttctttcctttttctccctctccctctttctccacatctttatttctgcctctagttgacaaaacatttcagagattttatatagctctccttgttctccctttttttaggaaaaaaaaattatagccagaatatttcaggctccaaagttgaaattgtatattattcttttcaactgtttctagtccatgccttaaaacaaagcagaatggaaccccaaaagaaaataacacttcacaatgaactcaaagaataatatcactactcacctttcaattttaaaaaatacatgtttcctaatgtatgtgtacccttggggagatgtataataccagggtctgtgacattaagaaatataaaattctaaaggtgtctgccttcccactaactgattttatcgaaaggtagtggtgatataccttggccctagaatacatatccagctttgagtctcctgtcaatggtttggaccacctattgccctaaaacgttgctactgtcatgtcattccctctcatttctcatgttttttagctcctgcctcattctcacttctctcttgtcttatctctcagtgatttcaatatacacatagactatccttcccatcctggcctgttggctcattgacctcctcccctgcaatgaccttaccctatcctctgtctacctcattagagaccaccttggattcatgaatgggattctgactaatcccttgcaggtcattctcaaaccactgtctctcagccctctagcttattctccctaggactcgaccccaggagaccttcagtaccctgaatcttccaattcattgatcagaccaccttttcactgacctcatcctgtatgtcttccgtcctccagcttaaactctaagatcaattattataattattctcttgcccttcttgtttcaggtctaaatccaactctgcttattcacactgcagctgtaagttgaatgcggctggagaaaaattcatagccatgctgatgggcctcatttccaattcatgactttaacattgtctgacaatactttaggtcacagtctagtcactcttctctctagacaactatttcataccttcttctctgtcctcagactcccactgcctgttgccccatcctcacactcatttgatcatcttgctttctatttcactgagaacaatgaagcaatcagaagacgatttcataaatctcactatcacttctacctgtttactagcatatacacctcacactttgacttcctgccagttaccactagtgaacttgccatgctcctaaagctgacatctccttctccacttaggtactagattccacctcctcttgtctattccaggacatccctccaataatgcttccttctgtctcttacatcattagttttatgctccctactggatcattcacatcaacctgcttctttacacatgcttcatctcccattttaaaaacacgttctttgatccatttccccaccagctatcatcccatttctttgaaacaaaacttctcaaaacagttgtatatactcgctgttttcactttttcgcttcctgttttctcttaaacttattccagccaagctattatcccaccactccactgaaagtagcttgactactcttgtcatgatcccatttctttgtttctttttggagaaaaattcctcaaaagaattgtcaatattcaatctccatttcttttctccctttccctttcaaacatatttcaacccccaccactccactgaaagtgctctttttgagtcaccagtgactctttgttgtaaaatccgacggtcaattctcagacctcatactaactgacatgtgagcaccctgtgacacagctgaacaccttcctttacacatttggcttcaagcacattgcactctcttggtttccttcctaccctgctggtctctcttcagtcttccttgctgtttttcctctttttcttgaccttatacttttggagtcttcagggcccagcttatcaggactcactatcttagtgttctcatccaaccctttgactttaaattccatgcatgctgattatcccaaaatgtgaataactatctcagacctctcctgagctctaaactcattatgcccacttggcatctcaactctggtgtccaataatcatctcaaacaatatgttaaaaaagagagacaactctgattttcctgcaaagatcttcctcattataaccttcaccatctctgcttccagtaactccatcctaccagttgctcatgtcaaaatcattggagtcatccttgacttctctctttctcttacaccccatgctgggaggtggggcctttaagaggtgatcaggttgttaagatggatttatgtttttcttgcaaggctggataacttctcatgggaatggattagtttttgagagagtgggttgctataatgcaagtcagcctctcttgtccattctttcccaggtgcttgcttgctcttctgcttttttgtcatgctacttcatagcacagcatattggacttctcagcatccagaattgtgagttaaataagcttttctttataaattacccagtctcaggtattcagttacagcaacagaaaatgaactaagagatcccatagccaatttaccattaaatcaggctgactctaccatcatactatgtccaccatccacctccattgctgccacctggtctgagaaacatctttcacctgggttactgcagtagcctcccaaaagatccccctaaatctaccattgccaccatacagattatttttcacccaggagccagagtgattcacgcaaaacttaagtcagattttgtgtcctctgctcaaaatcctgtagtaatttcccatttcactaagaataaaagccaaatttcttacactatcatacaagaccctacttgatctagcctccctcattcactgtgctccagtcacgctggcctccttgttatttcttgaacattccagacatgctcctgtcttagtgcctctgcttagcacttctcgtgctgaaatgctctcctccaggatttctactagctgactccctcaacttctttgactctttgccaaaatctcatattttcaatgaggcttcctctgaccaccctatttcatactacaatctcctccccactccctacccccaggactttcaatctccttgctctattgttttttccatagcacttataactttctaatgtgcaatattggtttcttgttattatctttctcccctgctaaaatgtaaaccccaagagggaagaaatctttggtctgttcaccgttatatccagagggcctataagagtaccaggcacacagtaggtacccaataaacatttgttgaatgtttaataaatatttgttgaatgtttaataaatataaaaatggattatgtgttccttgaaggtttggtagcagtcgcctcaaaatcatttgaacctcatgctatttttgtggaaacatttttttaagctactgattccatttgtttattgtctctaggtctatttagattttctattgcatttcagtccgtgttgataagttatacatttctatgaagccatatatttcatctaagtttgaaaatgtattggcataaagctgtctaacatcctgtcttatatttatttaaaccatcaatgtgactataattttctctccaaatattgcttattttctctctccttttattattaatctttggttaatgctctgtattgtcttacataaatttctcctgtttattattaccttttctctatgtcctttggcctaattctattggtcttttatatatttctcaaattatttttcatgatgagtgatacagcacttgccaatatttccagtttcctccttccaggctcaagagaagattacacctccctgtcctattaaagttagacaaggccaactgactagctgtagccaatgatttatgtcacttctgacagaaacatttaaaaacctatgcatggggaaagaattgtcttttcaataaacagtgctgggtcaattagatattcatatggaaaaaaagaaattgtgaccccactcataaaaatcaattccagatggatggcatatataaatttgaacaatcttggtgagataagattcctctttttttcttctttttaaaaatagagatggggtcttgctgtgttgcccaggctggtctccaactcctaggctcaactgatcctcccgtctccgcctctcaaagtgctaggattacaggtgtgaggcactgtgcccaggtgagaggtaagatttcttaaacagagcagaaaaacactaaggtaaaggggaaaatgacaaattggcacatattaagatgaaaaacttttgttcttcaaaaggtaccattaagatggtgaaaaagtaggccaggtacggttgctcatgcctgtaatcccagcactttgggaggccaagatgggcggatcacctgaggccaggagttcagaccagcctggccaacatggcaaaaccatgtcttgactaaaaatacaaaacaaaacaaaacaaaacaaacaaacaaaaaaaccgggcatggtggtgggcgcctgtaatcccggctacttgggaggctgaagcaggagaatcgcttgaacttgggaggcggcagcttcagtgagctgagatcatgccattgtactccagcctcggcgacagcgaaactacgagtccaaaagaaaagtaaccccacagagtgggaggaaatatttgtaatacctatactggaagagaaatatttgtaatacctatactggaagaatgactgactagtatctagcatgtacaaaggcttcctacaaatccatatgaaaaataacgtcagcccagtagagaaatagggagaagcctcggatactgcacaagagagaatatcctagtggccaacaaacacatgagaaggttctcagctcattagactttggctaaatgcaaattaaaaccaccatgtaatatcattactcatccagcacgatggctaaaataacaaagacgtaaagacaccaccacagactcgcgagactgaggagtgagtgtcgcgagactgaggggtgggtgtcgcgagactgaagagtgggcggcgcaaatgggcgaggtgtttactcgccattttgtgtgaggaacgttgacgctacctacctctggcctggcctctacccactgctgccctggccgctaccaacrtgagcctcccggagaktcctcacagccccgctactctcgactatgctctggaagacccgcaccagggccagaggtcccgagaaaagagcaaggcgacagaggtaatggcagatatgtttgatggccgcttggagccaatcgtgttcccacygccccggcttccagaggagggggtcgygccccaggatcccgcagatggtggccatacyttccacatcttggtcgatgcgggtcgcagtcatggagccatcaaagcggggcaggaagtgactccaccacccgcggasggcctagaagcrgcctctgcctcgctgacaactgacrgcagcctcaaaaatggctttcygggtgaagagacgcacggcctaggtggggagaaggctctagaaacctgtggggcagggaggtcggagtctgaagtgattgcagaggggaaggccgaggaygtgaagcctgaggagtgtgccatgttctcagccccagtggatgagaagccaggaggcgaagaaatggacgtggcggaagaaaacagagcaatagatgaggtaaacagggaggcagggcctgggcccgggcccgggcccctgaacgtgggtctccacctgaaccccctggagtccatccagctggaactggactccgtgaatgcagaggctgacagggcgctcctgcaggtggagcgcaggtttgggcagattcatgaatactacctggagcagaggaatgacatcattygcaatatcccgggcttctgggtcactgctttccgccaccacccacagctgtctgccatgattagaggccaagatgccgagatgttaagctacttaaccaatttggaagtgaaggagctcagacaccctaggacaggctgcaagtttaagttcttctttcaaagaaacccttacttcagaaacaagctgattgtaaaggtgtatgaggtcagatccttcggccaagtggtgtctttttccactctaatcatgtggcgccggggccatggaccccagtccttcattcataggaaccgacatgtcatctgcagcttcttcacctggttttcagaccacagccttccagagtccgacaggattgctcagattattaaagaggacctctggtcaaatccactgcagtactacctgttgggtgaagacgcccatagagctagacgtcgcctggtaagggagccagtggagatccccaggccctttgggttccagtgtggttaacctttgcctttggaattactcctgcagaaggttgcctgccaccaccagctggacctgagcttgggcaacagcattaggtatgccctttactttttttgttctgactttcctgtaccctctgtttaaactttccgttctctcaacctgaagattgagaccttggtggctgtgctgctcccctttcacctggtcgtcttgctattctgcattaacatcacatgctcccagccgatgggtcacatccttctaagcgaagcgaatgatgctgtaggttacactgtatttacctttgtttggactcggtttgttcccaggacctctggtctggctcctcctacttggatttctagctgtgtctaagaacctattcagctcaccctgctctgcatctgacagtacaggtgcatggcctgtggacaattgctgggcattaatgaagtcaagggagaacagcagggggcaacttggtctgtgtgaattatgggaccccattacttttcctgagactggtcacctattgctgcctgctactggctattcccaagtactgctacttgggcagctccctgctgagtgaacatatcccagaccattgccagctccactctctggtttctaataaacagggatctccagaacactggtggtggacacagctttcctgtcagcacacaaaagacctgttcctcttccaaaagacctctctttaccaccaccaccctcatcactcagaaaccctactgtttgttagacaggtggttgaggggacatgtcagaccctatcctcatggcaaggttaatatgttggtgttcttgacaagtaccaggctttctcagccacaaccagtggattcattcaaaatctaggtacctttatttgcctcccttcctgaacctaatgaagtgccagagtgagtgtacactttcttttctctcatctctcataaatctcttctgtcttcctttaaaaaaaacaaaagtagtagttcagaaacatccgcagaagcaggctttttagtttcttggctctctttgtcatgtccagaggcaggctgttctgtaaaatagactgccagacctcttattgcccattctcctttcttctcagcccctcacccctctttagcaattcctagagggtttaaaggactacagagctgtatggaatgaaaggtgatttctagttcagagtggatagaagaactaaagagattgtgatgggtgctctaggcagggaaaactgaacaaaaaggcagaaatgattcaggggaaaatcgggcctagaatttacactgggttgactagttatgatgggaagagaagtacttttttttagtatgcacgtagaagaatagaagatggttggagtgttaaatatgttccctagagaagggttctttgaagaaacactgcaattttgggtgttctctttcttgtttgcatatggccttacttatgtggaagattaatactgtgttataatattttctctttctgtttactgggaagattcagctgtacagattttcttttactttcaaatagaaatatttggaataatatcagtctttcttttttgtacattatgtggatatggatattcatggcagttttcagcctgttcttgtttctgttaaaaccgtatctttaacattttaatttgaataacttggtcttatctgatgcggaagactggaaactattgtgttcatgggtaaataaactacaaaatatttatggctttcattgtcctttttgataacttgtcctggtaacaacttagtaattgacatgtctcttttctcagcctcctcagtagctgggattataggtgtgtgccaccacgcctggctaatttttgtatttttagtagagatggggtttcaccatgttggccaggctggtcttgaactcctgacctcatgattcacctgcctcagcctaaagagtggaagtgcttgtgagattgttttgtgaaattggaattataccattggcatattttttttttttttgagacggagtctcgctcagtcgcccaggctggagtgcagtggcacgatctcagctcactgcaagctccgcctcccaggttcataccgttctcctgcctcagcctcccgagtagctgggactacaggtgcccgcaaccacgcccggctaattttttgtatttttaggagagacggggtttcaccgtgttaacaaggatggactcaaatctcctgaccttgtgatccgcccgaccattggcatatttattttatgccaatggtataattccattatgccaatgggatctttccttatgaatggatgatggtaaaattgaagcatgtcactgaaaaaaaacaaaacaaagatgatggaaaataacaaaggttgaaaataacagagataccaaaaggcccatatactgtttatgggagagcagctttgtacagatactttagaaagttgtttggcagcaccagtgcgaaccctctgatctagttctaggaatatacccaacggaaatatatacatatattcactcaaagacatgcataaagtatttctaacaacagaattttaatagctgacactgggagctgccctaatgtccatcaatagtggaaaaaaaaacccaattttttaaaatgttcacacaatggtatactattaagaaagaattatgcctacatgcaataatatgaatgaatctcacaaatatgttgttggatgtaagaagccagacagagtacatgctatataattcttttatgtatgaagtgtaacagcaggtaaaactaatctatggtggtagaagtcagaatagtgcttactaccaaggacagtgacgggtctgagatttacgctccttgcaagcttaacaagttagccttacatgctaggtcagagacaaaggaccttacaactcaatagtcagagtgtcagtgtttgcactggttccctgagctctaattcccacaaggcaacagaaagtcaagtgacacctgtacatacagtggattgtgttacaggagaggaactcctgtagggaacatagggaatctgaatcttttataatgggcagtaagcatgcctgtccttttcgctttgaagggagacatctctattataccgaatagtaagtaaacctgttctttgctctctaagggacataatctctattttcaagactataagcacacctgccctttgctctggagacatggtcttccaaggctgccttggaaagacattctgaacacacgcagtcagtgcctttgctcacaagatatgcagaaacatgagacacatgggagaattgtctcccaataaacttttagggtggtaagtacctattgattggaaggaagtaagagatggtagattctgaagcgctggtgatgttttgtgtcttgatctgggtgctggataagtaagtatattcaacttgtgaaacttcactgagttgtacatttagaaaacatacttctctgtatgtatattgtactttaatattcttgcttaagaaaaacccaaagtaagcaaataaattcaaaacaaaaaaaaacacattatttttctggaaactctctgccagaaaaaggccaatttaaaagtatgctgcacatctttttgggtaaaccatgaattgatatgtgaaaattgtaataggatcatttactaggcccattcaaatggttaaaatccattttctaagaatagaaacactgaattatctaggcatgggccatcaactcttagtatttacagtgctccactcattttgtcaactgacctttatcacagtttttcagttataaacacctctttaataatggctcatgatggttcattttttatcttccagccaaatagatcatcaaatccatatattttttatgctgttcaacagggatgatgctattctgaagactggcgtcaccatgtacttgctttttaagatgctctatatttcaaagtttcatgtcttttcaggcctccctctttgaggtatatttcatttgataattaagagataaaaacaatttcaaacaatacctatggcatatgctatagacaattacagtattagtaccaacaaaaacttctatagaattataatgaaatcattagctttggcttatttgagcaaaatctttccacttctgtatacagcaatgtatttgggtgataataatttaccatttgaaaatgaagtagtttttcttttacataaagagtagagtataaaaacaataatgtaaaagattaacttaccgcctttgaaacataaggtagatttaattaggctttttatatcaattcatatcacataattttaagtggcatccatatagatgacttgccctgttttccagtggcacaattttctctttgctattggtagctatcaacatatgagatagaagatactttcaacgccccccccaccccacccacctgccctgagacggagttctgctggagtgcaatggcacaatctcggctcactgcaacctctacctccccaggttcaagtgattctcctgcctcagcctcctgagtagctgggattacaggcgtgcgccaccacgccgagctaaagtatttttagtagaaacagggtttcaccatgctggccacgctggtctcgaactcctgacctcgtgatctgccagccttggcctcccaaagtgctgggattatagcgtgagccaccacgcctggctgagatagaagatacttaaagtagaggggtccagaattcaaatttaatccggtttactaagatagatgaggatggaaaaggtaggtgatatcctcacatttagcattaaactaaaatctagagcataaaatagaaagtgcactgagctacatgtcaggggttgggggctctgccataaaccagatgttaacttaagcaaaccacttaaaggatgaaaactatgtgagttttcttttttttttttttttttttttttttgagacagggtcttgctctgttgccaaggctggagtgcagtggtacaatcacagctcactgcagcctcactgttcctgggctcaagtgatctgcctcagccagcctagtagctgggactacaggcacatgccaccatgcccagctaatttatttattttttctggtagtgataaggtctcactgtgttgcccaagctcatcttgcactcctgggctcaagcaatcctcctgccatggcctcagagtgctgggattttaggcatgagccactgtgcccagcccatttttgtctttttagtaagttttgaaacataatctcttctaaatatgaagatttacctaccccttaaatataagttttccacaaggttctgtgacctccctctggcttttctttaaacgctttctgagtgactttacccatgccatggccagagcatgtaaatgacggagaatgtaaactagagccatcacctttgaaataaggactcttttttttttttttttgagacggagtctcactctgtcacccaggctggtgtgcagtggcgcgatcttggctcactgcaagctccaccgaggtaggaaataaggacttttaaattggaatcgcccttattccaaattagagtctgacaagtcaatttgcacaatgcttccagaattgttccctttccatatctattctcaccttaatacctcttgtctacattattggcagtcccaggagtccccttcctgaatattatctctcttttcccatcatttacactattgacaaagtaatcatgtcccttttgctcaaatatccttgtcaatgcaccactgcctgcagaagaaaatccaaacaccctactactgcatccaagatcagctacaaccaatcccctacctaacattcttaccagagtccactcacatggaactccttactattccttaagtagcccatgtacagtcccgattctgtgcctttgctcatgatgttccttaaccttggattcatttgcccacctcaaccatg

SEQ ID NO: 96788 - DNA, 15204 bp, Homo sapiens
caatggtgcttcaaattcaacacaggcaaatgaaatgactcaccctcaaaaccagttcctcctcgtgtcgcctatagtggtaaacagcaccactttctccccacacttgcccctggtaaaaacctgggcatctcactccatacatccaatccatcaccaaaacctgtttggtgtttggatctcctactactccatctactttttttttttttttttttttttcttgagacagagtcagtctctgttgtccaggctggagtgcagtggtgtgatctcaacagcctccacctcccaggttcaagcaattctcctgcctcagcctcccgagtagctgggactacaagtgcccaccaccaccacgcctggctaatttttgtatttttagtagagacggggtttcaccatgttgaccaggctggtcttgaattcctgacttcaggtgatccaccacgcccggccgccaaatgcttttataaaatgtttaggccaggcgtggtggctcacgcctgtaatcccagcactttgggaggctgaggtgggtggatcacaaggtcaagagatcgagaccatcctggccaacatggtgaaaccccatctctattaaaaatataaaaaattagctgggcatggtggcaggcgcctgtagtcccagctactcaggaggctgaggcaggagaatcacttgaacccaggaggcggaggttgcagtgagccgagatcatgccattgcactccagcctgggcgacagagcaagacactgtctcaaaaaaaaaaaaaaaaaagtttagtagccaggtgtagtggctcccacctgtaatcccagcactttgggaggccaaggtaggcagattccttgaggccaggagttcaagaccagcctggccaacatggcaaaaccccatctccactaaaattacaaaaattagccaggcatggtggcaggtgcctgtaatcccagctactctggaggctgaggcaggagaatcacttgagcccaggaggcgtggttgcagtgagccgaaatcatgccactacactccagcctgggcgagagtgagactctgtctcaaaaaaaaaattatgtttagtctctataaccataaaaaaggtattgcatcatatcctttttatagaaagaatcctggccgggtgcagtagctatgcctgtaatcccaatactttgggaggctgaggtgggtggatcacctgaggtcaggagttctagaccagcctgggcaacacggtgaaaccccgtttctactaaaaatacaaaaattggctgggcacagtggctcacgcctataattccagcactttgggaggccaaggcgggcggatcacgaggtcaggagatcaagaccatcccggcgaacatggtgaaaccccggtctctactaaaaatacaaaaattagctgggcgtggcggcatgtgcctgtaatcccagctactcagaaggcttagcaggagaattgcttgaacctgggaggcggagattgcagtgagccgagatcatgccactgtacttcagcttggcgacagagctagactccatctcaaaaaaaaaaaaattccaaaacttaaacgggcatggtggtgggcacctgtagtcccagctactcagtaggctgagacaggagaacccaggaaggggaggttgcagtgagccgagattgtgcccctgcactccagcctgagcgacagagcaagactcttgtctcttaaaaaaaaaaaaaaatccaaggctcaaatgagtgacacatcgataataaatagaaaagctgcaatgcacactaagcacggtcttattttaaagcccagggttttttacactacctcccatccatgctgtgatagcatacatggttacacactagtgcattctccccaatcctccttacctatgggtttgcaccatcctgggtgctgaggcctcaagctcctgaggagaaggcatctcgggaggtgccccccgcttcacaagagccaacacactcactgtcgggggcagccagctagatggtctcctaaaagaagggacatagggtcacagctcaacccacttccagaaaacccaagaaccctggggtttggagggagggagaggctaaggggcctaattgtggttcaaaagaggtcaggggttagtcactgctgagggcagagtgttcattattggacacaggcacttttaggctgatgagggagatgacaacaaaagtccacaacaccacaaatcacaaggaacctatggacccagcagggtctagacaggctcagaatgaaatggccactagagagtatctcaagccattaaagagccaccagttgttgaagcctggagcaggggttggcattttgtttgtttgtttggagaggagacagggtctcgctctgtcgcccaggctggaatgcagcagtgtgattacagctcactgcagccttgacctcctaggctcaagcagtcctcccacctcagcctcctagagtagctgggactaccaccacgtgtgtgccaccatgcccagctaatttttgtatttttctgtagagacagggtttcaccatgttgcccaggctgtttttcatttttctaaacgaccagatagtaaatacagttgacccttaaacaaagcaggtttgaaatgcacaagttcacctatatgcaggtttttttcaaccgaacaaaaaatactgtattctcaggatgtaataccacatatactgagggctgtcttttcctatacatcaactgtaggatttgagtatgtcagattttagtgtatgtgagggtcctagaaccaatcccccacatgtacctggggataactatattttaggacctagggccaagagagaaaattgagatcattatgtaggcacttaacataaccattaaaatgtaaccatttttagctcatggctgtagaaaaacagaccgccaatctctgccctaaaggatcatcactagagagtttcaaatgaagccgctaggagatctgagagagtcagaaggtcatagaaaggacaaggtaccccattacctggactttagggctccattctcattttctgcggggcccccaggcactccaaatagtcttcccaaccagaggcccctgcctggtgccatctcatctgtgggcaggggtctctcctgtgcaccttcttcagctgcagtcccatgacgccccggtgcccatcgggaaagaggaaagccctcagtgcccccagaggcatagacccgggaggcctgggtcaactgctcccaccagctccctggtgtgggaaggtttggagagtcagaggggtctgaagcagcttccttggaagtcccccgaaggctctgggccagccggcccccaaagtgcagcatggcttgcatagtctgctgcagagctggaggtgggcctggaggggcaggggcctgaggtgggcccaggggcaggtggtggtggtgctcaaagagcaggtccaggtggaaagtgagcaccgacaatggctgcagcaggagcagcagctctgtggacagggagggacaaccaccgcgggccagggagaaaaatcctgttggcaggtacaggagggagagcaggcctggaaaagagcaggccaacatcagctcctgccctggacctagtcccagaagaccccccagagcagcccaccagtcagcacacatcttcccaggcctcactctgctgggcactggggcagagaggaggaaggatgtggtgggctataggactgacatccccgcctgcatggaacctagcccaaataggaagacacacacagcaagtggtgacaagtaacagagacagtgcaaaggctacagaggaggaggacaggagagccatagaagcacatacaaaatgaggcgtgggggttggcctagtccgagggtagaggtagggcctcactggggaaggactcaaaggatgaatgatagttcagaggaagcaggaggggcagaaggtagaggaacagcataagcagggccctggagcaggaagggccaggcgggaagactgttggcaagaccctccaaggcaggggaagagggcagaggccagacagccaaggctttgggtctttcatcctatgggcgatgggcctccttagaaagttttaattagaagagtaataagatcggagatctggattaatggcattctggcagcagtgggaaccagcaggagagaactctttccttcccatcctcccagcccatcagccccatcctctaccatctgaacctctgacctgcatcttcctggagactggaaaaccacagctccaactgcttggtgctaggggagaaaagagggaatggaagttcagggaggtggaggactccagtcctctctgggtggaggatgggagatgagattggaagagggggggccttctctggggatgtgaggcactactactgtgtcccacccatgacgctcctgcagtcccaggtcgtgggaagggcactggaaagaaggcaactcacttgaggaggcccaggataaaggcatggaagcggctacggctgctgctcagcggggctagacggctgacctggctatacagggttccaagggagcgggtgctggagcctgagaacgtggggtgcagtcagccaagcccggccctgccctgcgcactgccgggtcccacgccctcctggctcacctggcttcaccgacgcctccaccacgctccaggggctgctcctgcgctgcccggtgatgaggtccttccggaaaggcttcagcccgtccgccaccagggcgtggagggccgggcagagggtggtcagcaccaggtgccccacatccgggctcagccggctatcacccaactgggcctggaggtggcgcgatgccgatggctccagagatccctccagacacctcccagccacctcccgccaaccattcccgcaccccccgcggagctccattactctcctcatcccaacagcctccccccagccaccttcaccttctgcaccaagttccgggcggccccgaaatgcgagatgattttatcaacggagacgctgacggctatcagaagacctgggaggagtgggaaagggaagacgctaggaggccgcgcccctacccaggcttgcccgaggggcgtggagagactgccttcggacagcctgagagcagggccgggggcgaagggcagttcattcggaagcgcggggtcgggagtcagggtgccctacctttcttctgctcctgcagctgaccagtcccactctgggcttctgccatccacagccgctgggctccggggacaccggcgaaggaccacgaactacggactggcgtaagggaagaagggcgcggtaacacttaccaagtgttattccgaggactccgggctcccgcacaagttgtctccggcgggtctgcagtgctgtgtccccgaagggtcttggggagaggaggcgcaggaccgcctgaagcacggggtagctcgacccgagccccggagtgaaatctcgcacacttcccagcactcgctgtcccccagccccatcccggttccctgtgccctccctcagggcacagcccccacctccaggatcccggaactccgggagcgggatggccgcgctcacctcccgcctgccctgctagggcctgtagggcgggagaggacggggcgcggggagggaggtgcagcccagcgcaccgccccggggcccagtcctgcctgcggagccccggggagcacgtgggcggcatggaccaatggaaagacagacaggggaaagggaggagacggagggaggcgagacccgaggattgggaggctggaaggcgccggaaaggggaaacccgggtcccgcagcagcctcttggcggagggtgccctcttcatcccgcgtgggactggactcgcggagagggcgtggccagaacctctagtgccaatgagctcccgggagcttcaccctccacccctccctagcaaggtcggggggcaggcccgagctgcacaggccaaggaattccacagagggtgtgacccaaagcccctaacaacagactcgctgggaccccctagacttggcatggaggctgggtaagcccgcgtccactatgcccaggtgggtctggagggagagggggccggcccacggagcaggaaaggcaacaacttccccctccagcactaggaacggggccagactccccaaggccgmcaaacttgcttggagtcggcttaaactgaagggcgggactaagctgggcaaccccggaaaaaaagcgaaaacggggccgggcgagagtgggcggggcggcccgcctgaggcgtggcccgcggggctagcccgggtccgtcttacgtagcctgggcggaggcgatgggctcctggtccagcgaggggccttcggcggacgaggttgcggtggcagcgggggggcgggtacctggcggggtgggggagccgcggcggggaaggtgctacttctgggaaagagcggggacagcagcagtgccagctcggggctggccaggcagggcaaggctccccgagtcggaggcgaataggctcccaccggggacaggcggacgggcagcagctgctcctctggggggctcggcgcccccagcagccgcagcccggcgccgggccacccggccagaggagccaggagcagagacccagctgcgcctgcgcccccaccctccaacagggggcgcccgtcggccgagaaccggaaaaccaggggccgagggagcaggaggggaccggctgcaggcgggattggcggggccaggcgcagagggaaggagggcagcgggatgggcagccaggcaagaaggggcgggaagaagagggagcaaacagttagtcccataacccaatgacccacccagtttccctttcccggagcgctccctggtagaaggggcggggaggatgggtgacacagaatggagggaagacagggggccgggttggaagcctaggaggcgtgagcggccgaagcccagccctcctcccgcttcttgcgacctcttaccctccaggccggcctgcgcgcccggctccttcgcggctggggcctcctcgccagccgctgggctgacagcccggccctcctcggactgcccctccgctatgggctgcagtccaggtcggttcttcttccttcggggagggacaggcgggggtgggggccggggcgggaccaaagcccagccaactggggggtctcgaggcgggactggcggggctggggcccggcttcgggaccggagttccttgaaggtggtgacttcccgaggaggtgccgaggagccgcccggcgaccccgagggggggagctcggtgtcgggcgagaagactatgagccagtcactgcgatctttcttcgcctgcgggacaaggggcagccctgggccccgcttgcgcttctgggccagctcgtggaaggacgtgattgtccggtggggcaccggctcctcgctgacgtcacttctccatcctccatcaattttccctgcatctgttttcgagccagaatcagttattcttgtgttggttttccaaccagagtcgaatttttcaggttcacttttccagctagagttaacattcccgttgtttttccaaccagtgttattgttttcagtggttttccattcagctttagttttctctgtgtcaattttccaaattgggttaatcttccaactgggctccgttttcccagcgtcgattttcccatcatccgcctctaagagctcagaggtagggagatcctgctccgccctctcgtcctcttcctccaagcctggggaagggacgtcctggcaggtggtcagggcgttgcagttcgagtccaggccaggatcgggtgaagaagaagctccggagcaggaatcaggagagcagcagaagctgtccggtgagcaggtgccagggcctgctgaagccagtggggagccctgctccagggggatgatactgggctgagggtgggcatcctcatcaccagggaggtcccgcaagtagactgagacaggggactcatcggggctaagatctgagcaggagctgagtgaggaggagcagcctgggtctgagggagaggcagccccctcttcctcctgtgacgggtcctgccggttttctaggcccggaccgtgctcctggcagcaccggcagggcacagctgggctgttggaattggcgtccaccagggtgccactgcaggggcccctgctctccttgcccccagtgtctcctggaggagggggtgtgctcaaaggcccctcctgtagctcaggacggcgggacaagtgcaggcccagggagacgtgctggaggtggatgtggttgaggttgcagagtaaagctctctgaggggacagcatgatgctagcggcgatgggatggcttctagagamccagaagggtagggtctctcacatccacctacctggcaaccacaggtgcagacctagaagayagaggtggtgaagcccggccagtgaggacaagagctgcrgggaaggacaccgaggtgacttgacggcagcagcaggcctgaaggctctggctgctttggaagatatttcaatgagatgcaaatcgcaatcgactgaccattagtttccactgcagtgtttgcagatggagtcgaatgtaaccccccgggaatggagccgggagggtcagagaacgcggctgcgctctggatctccgaaggggggcgggggcctggaagaggtccgggcccagaatggacctccaggtccctgctgccgcaatctggccctgccctccagcctaccccttactcccagaggaagggacccagggagacccacccagatgccctgaaaggaggtggaggatgggggtggggcaatacgcagagtttgtctggtgaatgcaggaaaggggtgggggctggagaggaaaaggatggagcagccgtcagcttgtcaactccgcatctgctggctgcctcggccgggctccagcctgcgccctcgcccctcggaacagcggtatgtccattctctccgcattcgtctccatcgttcagccaccaccgcaccctttctctattcatttctcctgctcccttgtcctgccccgcccctcgtgcccaggtccatcggtctacacccatgggccgagccctcctcaccagggtcctcctggaaccgctccggccttgggcttgtccgcggctcccacggtccccgcccggcggggcacagagcgggaggggaggggcactagcacaacctaccctgcgctgcgcagctgcaccccttcgcgcatgggcgtggcgtagctcagacccgcccccagcgtttagcgtcttttgtcacccacctagagggtttgatatatcctaagcttttggcccctgggtcctggttccgtgcagcgagtcctcccagcaccccaccctgcacattctggaaagagccagactctggctgggccgagcaagaacagaaccacaagaaggttacacgattatttattgagagcctcctctccccgcccttgcaatctctaggtcactttctccgcttgtagattttgcgcgcaagccccagaaagacggctgggggcaggggtgctgcgtactgttcaatgagagccataatgtggctgtaactgtcttcctcatattgcaagaacactgctggcagatccagctcctcatatagcgccttcacccgggccactttctcagcctccttctgcccgtaattttcctggaagaggttgaaagacaggaaaacgggcttggccttccccagagcctccaggacccctccactcccctcattcacatattccagaacatctccaaagccacccactcctttcctccctccaattttcaagtgtctctacgtagctaaaatcccaagcttcccttccctatcccaaatattgcctcataccaggcatcctctactccagggtttctccaccttggcactattgaaatttgggaccagataatcctgtctgggggagctgttctgtgtactacatgtttggcaacatctttggctcctgccaactagatgtctgtaccacatgcacacacacagagttgtaatgacaatggcaaaaaatgtctgctgacattgccaaatgtcccctcgggaggaaaactgcctctagttgagaaccactgctctatccctttccaccaactcagggacccaccaccctctctcaggcaccttcaggatctggtactgttctggagtggcccgttgcagacactgaaccaccagccagctgcatttgttgtcctggatgtcagtgccaattttgccggtcacactggggtccccaaagaggtcaaggtaatcatcctgggcagggagggggagggcagcaaaagaggaaggatgaggttcctgggcagaggaggagtgaagctggtgcctgttctctgctactgcctcctgccttcttacctgaatctgaaagaactcccccatctccagcaggatcttcttggcattggcgtgctccttctcgccatcaattcctgcctgcagggaaaggggggttaataagccaaaccccaggggtgccggcatcttcctggctgcttcctcccatggggtcttgccctactgcagccccaaatctttcctctctcttcagacatcttggcttccctgacctagacagtcctgactgatggtccaacctcaatcccacttatttttggctaggccttcctgggagtcataaaagagatgaatccattctagaggtgcacagcctgtctcttccctcacaaatgtcagtccccaagtcattctgatccaccttcctaatatttttgccacctccaacttctttcaagatgaaaaggaaatgtagagaagcaaggtcagggtagacacttaatcccactgactgtctttaatccactcttctccctctcaacctggatgatctccacactcctatccatactcagatacaggatatattgttcccctattatgtgctaagcactttcatatcccttgccttgcttaatctttacagtcctgtgaagtaggaattttatccccagctgaggaaagagactgagcgagaccgacttgctcaaggtcacacagtttttcaccaggggtagcagtgttcacgttttctgctctatgccttgctgtccaaaagcccccatcagcagagcagagaggggtgaggaggctcactcaccatgtacatggctgcagctataggaaggtagaaggagtagaaagctgtcttgtacttgacaatagatttgtacctgagtaaggggagaagagaaactcctcaggagggcaatgcacatcctgagccctccctcgctgtccagacatggttcgcgctgtccctcacctcccctcacctcttttcagtgaatctgacaagatccacattgccctggggggctgtgaggaggtccagggtctgcccaatctcagtctgataggaactctaagcaagacaaagacggtccatgagccaggctttctccagatatgcgaaaccctggtatcccaagcccaacatcccataccagctgacaactgggcagaatcagaaaggcaacagaaggggagaaagccccaaaacttaaggcccatattcatacacacagtcctttatcaccctttcttccaattacacaggacagagaagccctttcttgccactaccacaaccccacttcccaacacccttcctcgctttctttcccttccaggcacgctgcaatcctgtaccctgaaaccagctagatgagcatgtcctatagaggccaaggctaccatgggcaccctctgggcatcgggccctgtctgcaatacacctgcaggaagagctcgatcaggttcaggtaatagggctgctcccggcaatagagcttcagcaggcggtagatacatgcttccaggaggttagcatcattgatggcatccaaacccacgcccggctgtcatgacagacagaaaaacaagcaatcaatctctagtctcggttcatactaagagccatcaccccaacacctcaaccaggccatatataaccacctccctgtggcctgtccccatacccactgctattttcctgcccacattaccttctgataccagcagatctgtccccggcgggtaagggatgaatccatgatgtcatctgccaccaggaagaaagcttgcagctagaaagagtggaataagacctgcagggctcctcattactgttccttctatcagcaacagagctgctactttatatctgtatatagttttgcttttttttggtaggggacagagtctcactattatccagtgcagtggtgcaatcacagctcactgtagcctctaactcccaggctcaagtgatcctcccacttcagcttcctgagttcctgagaccataggcacataccccatgcctggctattttttttttttaatttattttttgtagagacagggtcccactatgttgctcaggctggttttgaacccctgggttcaaatgatcctcctgcctcagcctcccaaattactgggattacaggcatgaggcatcacagccggccagagctgctgcctttgacagtccctatgagctgggaaagtcaggatggggagacagaagacttctgtgctatggagacttggaaagtgacataacatgtttggctcagactccccgcctataaaatggaactaaaacactcttgttttaggttaagaaactagaacagatctttgacatctctaatgagccctagattattcctggtgtcagggagattaggaaacaccttcatataccgtactctattcttgccaaaaacctcaatgaatgcttaaagtaagatctattcatgaaactgacttcacattacttcctaaataaaagaaggctattcccacattgcccccagcactgtgtttgaacaccctggtgactaggaacacagccttacctaaagcagctccttagcagtgcaggtctaataaggtggaactgaaatctgactttgacctatgagtctcagacatctttaaacatctttaaacattaactaagggcttactcttctgagtgcccatctgaaggtacctgaacgtgtcgggtttcccactagaccatgatctccttggaagcagggacagtaacttccccctcttagcatttgcagagcctagcacagcattaggcctggagtgagagtttcctaaacacttgtctgacaaagaaattaataaaacactctaacattccctgtgatacttcttgcagtcagtcaaactatgttttggttccttaaatagcttttctttttttttttttttgagatagagtctcactctatcacccaagctggagtgcagtggcgccatgtgggttcactgtaacctccgcctcccaaattcaagcgattctcctgcctcagcctcccaagtagctgggactacaggcacctgccaccaccaactgctaggccagctaatttttgtattttcattcagtagagactgggttttgccatgttggccaggctggtcttgaactcctgacctcaagtgatccgcctgcctcggcctcccaaagtgctgggattacaggcgtgagccatcgtgtctgaccattaaatagcttttcaagacatggtttgagttgcttttttaaagagacaagggtcttgtcatgttgcccaagttggacttgaactcctgggctcaagtgatcctcctgtctcaactcttgagaatctagggatataggcacacaccagcgcacccagctcaagacatggtttttattttcataacttatttcctttttttgtttttccacttctagatacatacccaggtttttgtttttgagatggagtttcactctcattgtccaggctggagtgcaatggcgcaatctcggctcactgcaacctccgcctcccgggttcacgcgattctcctgcctcagcctcccaagtagctgggattacaggcacgtgccatcacacccggctaatttttgtgtttttagtagagacaaggtttcaccatgttggtcaggctggtctcgaactcctgacctcacgtgatccatccaccttggcctcccaaagtgctgggattttaagtgtgagccaatgcacccggccctatacccaggttttaatttttattattattttcttttgagacaggatctcactctgtcacccaggcttgagcagaagacatggtttgtgtgtttttttttttttgagatggagtttcgctcttgttgcccaggctggagtgcaatagcgcgatcttggctcactgcaacctccgcctcccgggttcaagcgattttcctgcctcagcctcctgagtagctgggattataggcatgtgcctccacgcctggctaattttttttttgttttttgttttttgtttttttttgagacagagtctcgctcttgttgcccaggctggagtgcagtggcacaatctcagctcactgcaagctccgcctcccaggttcacgccattctcctacctcagcctcccaaatagctgggactacaggcgcctgccaccatgcccggctaatattttttttgtattcttagtagagacggggtttcaccatgttagccaggatggtctcgatctcctgacttcatgatccgcccgcctcagcctcccaaagtgctgggattacaggcatgagccactgcgcccagcctaattttgtattttcagtagagatggggtttccccatgttggtcaggctggtctcgaactcctgacctcaggtgatccacctgcctcagcctcccaaagtgctgggattacaggcatgagccactacacttggcctagaagacatggtttttaagactttatcccatcctaatcctgtgtgctgtagtggatccacattgcaaaggaagcatgcaacaccgcctgccagagcccagcatgggccgtggggaaaggaccgttgcaatcactgctgttataggcagggtcctcagggaaggaggcatccatctgcatctttacctctgacctaaactcagaagagtagtgtggaggtcctgggctttccacatcaaaggcacatgtttaattgactctgtgtttatttggagtagcatggtttccctg

SEQ ID NO: 96789 - DNA, 14407 bp, Homo sapiens
ccatgcttctgtagttcttgaggaccacaagaccaaggttggaatttccctggctgcttctgagagctgatttgaaagtctgggtggcccctggctctgtgctctctcagcctcagtgtgacatttttaggcacacatgttaaaacagtcttcagatgttcaataggaaaccaacacaatgtcagaaagaatagcaccctaacaatttcacagaatggtttgcttatgtctgtctgctgaattcctaagcctccagatgcagagggaagtattcagttagttgtctgttaggttcacactcacttttcactacccttgccccccataatttggaaacttgacacattgtcttttgaagaacagagtctgggaagcagtaacctggtgtactggttggaatatagtctcacaaatatccagaccattgagttttagcctttttttaaggtcccagatcccatttcttagatcgaaagcttctcaaataggtttctgtatgggctttggggagctgggcaggagggacactttcaacctccaaaattactgaaaaactattggataggcatatgcacatagttttgcagtaattttggaggttgcaaagagtccctcctcagcagctccccaaagccccgttgtttctaaacttctacttagatacttgtatgggttgtttcagataacagagtagaaatgctgagaggtaaagagatggccactagctagttaattagctgtttaactattccagcctctaatatttatagtaaggcatttaataatatttaaaatatttacatcatgggtataactaattatacatgagtgattttgggactctaaagcgtagtaatattgtagatatctcatggtttattttccatttcaggaagaaataacgtactttaaattttaaataaggttgtaattggcatgtaaggtggccctctcagcacagctttatgacaggccttcttgaaatttgctggccaagaccacaaactttagcgagtaaaaacatacaggctttggaatttgagtccaaattgcaagttattagccatgcaactggagtaagttactttgcctgttttaggcctcagtttcctcaagtattattgctaatttctttaaactgaaattagcaataatacttacccacaggtttattatgaggatgaactgagattgtacatgacagcccatacatagcatagtgtttggcacatagtaaatgcttgctaaatgcatttattaacactgtactcttgtctgatgagagtcttcacaaacaacttcatgactgtctttcgtctaagaaagagtgatactaaaacaaagcatgagaaatggaccaccaacttctgaatattccaaatatcactctctttcttttaatgtgtctatcatttaataggcagggtaactagaactatcagaaatttgtccttggtttatttggcttttttgtgtttaagtcttttgtcctggagctacagatagataattataaattcattcaatcctggcatgagagaatctctttgctttagattttttaaggggaactatggacaggaatagtttcaaattccgcttttaattgttagacgaaacaatgactgcaacgcggctgactctatcaaaatgtaaagttaaatcagggttacttgttcagtcttgacacaaagattcctgtcattgtgtgtgataacctcttcgaggcttgtaaacttaaatacgtttatttctcattaccctttttgctattattgtggccaatggtggattcttctactagggttgtacatcagtgctggtttggcaggctggatttattttaaagaaacgcttcagggatgcctacttttccaccaaaaatcaatcaaaatgttgtgaagggagcataaattgtagtcatctttgctaggagagccttccaagtagcttgaaaagaggccttgatagatggaagcaaccgcaggctggagtctgggggacttgcctagtggctaagtcaggaccatcagcagatgtatgatattgggaaaaacacttttattttatctgggactcagttgtgctatctataaaatgagagagtagaaaatgcattctaagatcttaatgtcttttggttcccgggccctctctgatcagctaaggaagggtatatccaagctctatggataaaagcacattccaagataatttcaccagttttcactgtcccccactgcctgatccacccacccagagaccccaaccccaaccaggtggtgtgcagcatctcaattaaaagcccttcaccattagatgtgtcttcaagccatgcctagttccaaaataaccttggagatatcttgcattctcgttctcttgcttgagttctctgacctctgagggtcaggatgtctttgttgtataagtttatgagcacgatgaaggaggaggagatattatttcacttgacatttgaaacaactggcctttgagtctaaactgaatatcatctcccttgtaagtatttctaggggaagcctagatatttggaaagtgctaaggcaaatatcgatttgatttaggtagatttcaagcatcaaatgtggtggttggttgtggtaggtagggctgcgtgagaggctggggcgtgtgcctggagatgttaaatattagaatttcacccctttttctttttctctttcttcattctctttccttatgacccctccatgacataggtggtgggctggcctttgtctgattcttaagacaaagtttctaaagaaactttgacttattttcataaagtacttaattatttgaggtgttatttgtttgtttgtttgtttgtgttttttgtatttgaaaagtatgctgatttgcccaagacattaagaatgatagttgctgattgttaacttcctttagcgggtatttttggatttgcttataccatatattattctcttctggggagtcagggcagggaagagaaagaacttcgattttatctaaagcatttgctcagccaggttgaatgctacttctgtttatgtgattattgaaagcttcctttaccccccagacagcatccagtacttgttgggagccatctcattttatcttcatggcaaccctatgggataagatgcagttagtttcctcattttgcaaatgaagaaattaagggtcagtccaaggtcactaagcttataagtgattgagttgtgtctgaacccaagtccttcagagtagagaacttaaactctcactaatcacctaggttgtctgggagcattctagtacaggggaggaactggagaccttactctctgtgacggtaaaggaagtggagccagataatcagaaatctaggtcatgtaggttggattcctagtccaatctgttaggtcctacctcactctttggcttactacagttcgttgccagttctagatctgctataagaagtgtctattctggacctaccaggctcccacatgctcacagaacccaccttaaccaagttctccaggatgagtctttttatttctaggctagtatctcttgattcttcctgtaacgcttcttactcttccttctctcctgctctctttctctaatgtttttttaaccatttgtaacattttgcaacttcaagcagaagcattctctgtaccgtcaattgtagaaagagaatgataatagttcctacctttattttaatagttaataattataaaaataatagaaagaaaataaaaataatggctaacatttgttgtttagttactgtgtggccaggaactatgcaaagcatcttacagtatatttataatctcattacatttcatagtagcccttttatgtagtgtcctttttatcatctcccttttagaggtagccacttgggacacagagagtttaagagacttgcccaagataaacacttcataaggtttgggacttaggttatctcactctgaggcccaagcttttggctattcatttatgttgccttcttctaattcatggaaagcgaaaggaacagtgcctagcaaatgccaagaatctcattcatttgccagcaaataatctcagagagaatcccctgtatcctagcttcttgggatacagtaatgaataaaactgataaaaatctctgtcttcttagtttgcattttggttgaggggaatgagggcccacaaaaaaataagtaaaatatgcacatgttaagtggcgattagtgcaatgaagaaaagtaaagctagaacagggactagagaaggctgggcattggcactgaatataagtaaaattatttgtaatgaatagccgtggtagaatgcaacctgcttttgttgggttggtatattgaccactgataaggtctggagttggtgtagaacttttctctctactatagactcaatttccatatctcccccgacaaccttagaatattaggtagctttgcaacatgaaactggaattcacacacctaaaggcactttcagcttatagtgtgagttttgtgatttaacatttattgggcttggctgctgtgcacacagcagtcatttaggtacgtataaagttgatattctctgcccgcaaacatggttgcctttacatagactcatccttcactaggtttgctgattgtgtcactgccacttaaatgtcacagtattaagcacaaggaaatgcaagacagatgaggtagaaaataaagtctgtgtttgtttctcatgcttggtgaaggtgttttatagacactggaatagtcagtggaactaggccaggatggcctaaatacctggtgctgaagccaataggtaggtgtttaattgtagaaatgaagcatctaaccaacacatttagaagcagtgtttaaagacaaatttcaccatttttactttggaaaataagactcctggacttactgtacgaagtgaggcaaaactatgcacagaatgagaacacggcttttcttttattattcttccttctcttgggcactgtgtagcaaatcatctgtcattttggggttggggtacaacttggcctaatagacaggcaatggtaactctctggagtcataacagttccctttggcttgcctttatggccagtatagattgctaaggctatagcaattatgaggcagtccatatcagttgttgaaaacaatgccatttttgcccaagagaaccatattcttccttatatgtggcacaaactagttttgtgggttttttttttcttttctttatcccctacaaatcattgtacttgaagatgccacactacccctgtgaagtactgctgctctggtcctacttaatagtaccacaagaagaaataggaagcttttaaacattatacctgtattttcattggtggtgaacagttagttatggaacctctcctttgtgccagaaatcagtgggctgagaagaaaaatgaaacctggtctttggcccaaaataacttcaatcagcaaatatttaattgagcaactattatataaatattctcagaacttatggggatgaaatgttgaacaaaatctaacatggttcttgccatcagggaggttacaatctagtgggatagcaggaaattaataaaaaacttaaaattacatctttatgctataaagaagacatgtttgtggtaggatatcttagggaaaactggcctagttggaaagaccacaagagatcttctttaaaacatgattgaattgggttgtaagggatgaataggtgtcagtgaaggcagagacagaggttggggagggatacagcatgtgcagagggcctgtggcagaagagagaggttggtgtggtgggagcacaaggcaagagaagaccaaaaatgcaagataaggcagtaaagataatggggccaactaaagccttctaggcttcgtttgggatccaagtctctatttttaatatggtaggaaatgactgaaggccagaaacagagggaatcagaattgtgtttcaagagcgtcactatacggttaggatggaagacagattagaggaaatgcgagtggataaggcaagatgcatttggaagacagtcaagagtttaaccagaaagagaagacatgtcagtaattgccatcatgggaagcagtgagaagcaccagaattgagaaaccaagtactttaagagttagaggagggagacacaccctgtctagctgaggttcatggaagagttggtattcaactgggagggattttatcagtagaggagctgagattgagaatggggttgaggaagagataagtcaggagcaaaaatacggaagtgagggagcctgtgactgaagagcaacatgtagatcaatttgatgaaagcactaggtaggggccagcaaatactggtttgcttctgttttccagagaacctcgaggagacaaggtagaaaaccaatcccaratgaacaggagtactactgagacctgtactgaataagacaagagaaactcagtgagctaaactagggtataagccacttgcaggagcagagcagggtcaggcattggtctgacttgctgtgaagacyttaagctgtgaactcataggacttggattccacttgtcagggagtttgattggttcagaatctggggcaggatggaacctgcaggaaaaagctgactggccccgtgtgagacaggtgacactggaggaatgaagaataggcaccctcagaggtttaggctggaggcttggtgagaatatcaaccctgacccatagagctactgaaatgtatgatactacagtgagcgccaaggataccttcccagccaaacatgccaaggaatagtctggggatggctagtgaaccaagcttcacaggtagccscagttcttcatgagagacacacttgagttgctggcaataatattcttactgtccaaggttaagtggccctatgtctcacaaggccccattcagggcttatcaagcctcttgaatattccatcaagttagtctgaaactctagagtrtttactttatatgttctgaacttaacagggcacattctgtctctaatatcttggttctgagtacccatcctcactaggacactagtgccatcttgctagctggtccatgagttacataatgatggagcatctcatatgtgtagttctgtaacagtgaccaagcagtggacattcctatccattcaaggctgaacatgtgatggagcaaggcatgtctgcacagggcctagcakgaargggttgaacccttataacttggaaactaactgaatgggagaaatgagatggaataargcactgacgttggtgcaatttctgattatattttgttgccatttaacttgtttttactgtatgccacaccctgtggtaactcgtttcatctgcacagtgacccttgaaatgcccacagtatagaygagaaaactgaactccttagaattgacgtatcttgcccaaggtcatacaatgagtgaatggggcaacctggacatggacttcagtcttcctgagctcagagctgaccaaagactctgtctaaacttccaagacscttttctcccattggttgatgcacatggtattgaaaaatgtcgagcattctctttctctgttgaaaagttctgcctcccattagttatgaagggaatcctacagaaaggggtgagtcccttaaattcttcaaytgattatgggaggttagcaaaaaaagagagtttatgaacccatgaaaccttaggttctatstatcagctgtgtcttactgaaatcacctcttgaaccaggacccttcagacatagcaattcatgtcctcagtctctggacacaatggaatcctcattataaggccttccacacaaagataataatagtggtgcctctcccatgtgtgttcacatttttgagaaaaaatattcttgcagctatcaaagcacctgctaatcaaagatttcgtattccctgtaatttgtttttaatcttgtaaagccgactactttcaaataggactcagagtgtcaaaggctgaaattcatttccttgaacttcatttaactgggccacagaatcattctgagagaatcatttaaattaatatgtggcattacggtgttaaaaagaaaaaaattttgtcctaattcccaatttcagagtttctccagacctccaatctgggctctgaccccataattgtgtgcagctgagctgctgacaagtccacacatattctgaagtcacattttctggctctggggctccaaggactcacaaagaggaggaatttttttttttttaatccctgcttgttccgtcaactagttcaccggttaaaccctgattgaatgtagaaattttagaaatgaaaaaaaaaaaatggctggagtgggacgtgcaggtttttgcatcccaagcattaattcgccccaagctgtgttagtgccggacgagacagcttgtatgaaaatttaggagtcccggagaacaacaataacaaaaattaacaaatggcaggatgagtagcagaagggaaaatcaagcatatgctgctcgtttgaaatgtagtttcattaaaaatcttttccattgcaccctaaaacaatctgtccttgccagataacacattggacaccaaaaggctgttccctccgcttgctttcttagttgtaagccaacccttataaaaataagaacacagctgctcgtgacaaaataaatttgtcagcttgtctttgaaaggtaaaataaccagggggaactggtgctgcttcccaccacttactgacaatagtaagcaacacccttgtgtttgtgttcagtcaacaccaatcaataaacatctgttgggatgagcattggtgcctctttacgattcattatgcttcattaggaattggttttgtcttcaagggaagaaaaaagaaatctcatgtaattaaagaatagtgtcttgtgctctcatattttcccccttaaagacctaaattcttttaaagccgttttttacagtacatttatctgtatttaaatgtaactactttaccttgaaaagaccatctgttcataaagaccatcctttttgtcttgccagaggtaaacttgggaaagaggtagtgttagctgggaactatggttaaatggaaatagatgagacttaaggcaggttagggaggttccctacccagcaaaatgatattcagttatgttctgggtggggtgaaaagaaaacacaattttctggagggagatgtgcatttgacatgacgttctttggaaatggttttatttcaaagggaggtgtacttgaaattcccaaggccagttaacttcaacgatcctttccttggacttattatagacaatttaagtggcctctgcagtatcagacatacagtaagttttgttattttactttcaagaaaatatctcgcttttgaggggctgctggaaatattagtgtagatgatgaagctgtactaaagtcaccttataggcaccatgaatttgtgcccattgagggaaatatccttaggtgaacttaacaaaatgtatctaatacacgcaagtacgcaaatgaagcataaagtagctggtaatggccccaaattatacaaaacacagttactgttcccattagtgtttgtttgtttgttttgttttgtttttaccagagccaaatttggggaactgaaaagcaaacaagcacttcagagagagcagaacactgcagaggttggggtgaaattcaagcgttaggattaatgaaacattagcatttacctttctacttaactcatattagagcccaaaatttgggggtttggggactgttttgtatggatagaagctttctttgagaaaagaaattaaggaatttcacttacagactgcaaccacatacaaatgaaggaaactgaacaattgcttagaatgtgattaatttgtatttttgaataatggaatggagattgccataggaaagaaccatgagacattcttaagcaacacagtaaatatgcgtagaacagctcagatccctttggatttagatgcagaggacttctattgttgttttccctacgagtgaaggataatttcacagagaataatgtgtttgtgcagaaaatttaatgtgtgagcaatgaacgaaacatggatttctcacatgacctagctgacctcttctttgtatatttcccaaaatatgttcattagagcagttgactgtgatgatgctcagcaaaattcgaagatgaagagaccctagtgaagaatgtgtgggaaatgttgcattcttggtctctttcctgcactgccacaggctgcattggcatctgaaaggctcccagaaatctggcagcaaataaacaactttagctttgtttaactctagcatctctcaaaagcatttgacagcaagcgcttttgttcacagagcgtgttttagcatctagcagcgttgagtgcttgtggaaacacactttggcacatgctgacctatactggtatcttctaggcttatgtaactaatggacttaatggggagtaatggattaaaagtgctgagatgccatttctgtgagtctctggggaggatagagaacttgatataaaaccacagaattaccactagaggcattgtgagaactgctggtatctgatttttggaatcgggagatgaaggtttatttcttgatggactaggcttcctgcaagagatatcttgaaggtacaactattttttttttcctttttgtgtctttttttgtttttgtttttgtttttgttttgatagcctactaaagtgagtctaaaagtgtttcttaagtagagctgagctttctgaccaccttaaagttcatataggtttctgccctttttctggccaggcctttactttatcaaaaatctacagttcatattgtgaaatcatatcgaaactgtatgatttcatcacctggagtggagagtcttggccccctgaccttggtagaggtgttctcagttaaggtcaatggtgggtacagcctaaagaaagtttgccttctaaagtcctgattatacactaaaaatgcctccctaaaaagataggtgatagttttctttacatcagtgttcctccatattggtaaaggtggaaaactgactacctacccctggtctttttgaatattactatattactcttgcttgagccctgctgtgttagatgaaaatgacatgcttcgcaaaggtattgtgagagagtatgtcatataacttgcagatatcctgattcttcttaattccttcattttccattttctaagatatcttttctccattcttttttcttttatgtttcttagtctttcttcttccttctccttttcttcattttcttcactcttttcttcctttgttcatctaatcttttcttctccatcctcccctaaagcagaattatggtagctttatatactatatgttgtattttgtagcattctttggatctactgggcttatccaacaaacatagaaactgaggtgcctttgggagccatgctggctcttcgtgaacacctttgccaagcttccaccaacccttctgaaacagtgcattttagaattttacctgccttttatcaagcttgtaaggttatagtagtcatgcactgcataaaatttcagtcaaccacagaccgcatgtatgaaggtggccctataagattataatggagctgaaaatttcctactgccttgcaatgtcgtagctgtctttacgttgtagtccattgcattattcccttgttcatagcagtgctggtgtaaacaaagctatgctgccagtcgtataaaagtatcacacgtacagttatgttcagtacataatacttgataataaacgactatgttactagtttgtacccttactatactatacttttttattgttattttagagtgtatttattatttttttaaaaagataactttaaaaccgcttcaagcaggtccttcagggactattgcagaagaatgcattgttatcataggagaagacggctccatggtgagtgcccctgaaggcctttcagtgggacaagatgtggacatagaagagagtgatactgatgatcctgaccttgtgtagacctagactaatgtgtgtgtgtgtgttggtttttaacacaaaagtgtaaaaagtaaaaaataaaaggttttaaaaatagaataaagaaagaaaatatttttgtatacctgtacagtgtatttgtgttttaagctacatgttattacaaaagtcaaaaagttaagaaaattaaagttgataaagttaaaaagttccagtaagctgattaatttattacataaatttagaagattcatttagtatagcctaagtatacagtgtacagaaagtctatagaaatgtacagtaatgccccaggccttcaaattcagtcaccccttactcactgactcacccaaagcaacttccaatccaacaagctccattcatggtaagtgccctatataggaataccatatttcttatcttttataccatagttttactgtatcttttctatatttatttagatacatgaatacttatcattatgttaccattaactacagtattaagtgagtaacatgctctatacctttgtaacctaggagctgaagggtatagcatatagcctagctgtgcagagagctgtaccatctaggtttgtatgagtacactctatgatgtttgcacaagggtgaaatatactagtatacttctcagcatgtatccccattgttaagtaacacatggctagctgtagttagttcttttgataaagagatatttattcttatacagtatttagatccaggacaaccatatgtgagttgcacaggttatgccctacatgaaagtttctggctacagtgggacttggggtaaaatccagtccaagccacatgcttgggggacaagaaagaggtgctttctctcttgggtgccagcttctagtttttgcccaatgggaggttgaatactaagagtcttatttgtttgaatacctctgctttgttagaatacctctgctgtaattcttcacgggctccaaaaagcaattcagcagttttatctgcaaattctagaattatctttctctggatacctttgcatgtggccatgtttacttagatgttttcaaatcagtttatcagttttatctgccagttatttctattcatccagtctagaaaggcctttaagacggtgacatactccctagaagtctcatttcccagtctgtcttggtcatcagttctcttagcagccagtttgatttgctcttgtttgatagagccaagaggaggaaattagaagttgagttcaactttctctgtgctgatctagtttcatttgttgataaaaggattttaaatatttatagttagttttgaatatcaattctaatataaatgtatagtcatgggaatcatgtaggctagaaattgggcttaattaattctctttaaaaagttcatttcaagaatcacttgaaggttctggctaaatctaataaacctaaactccagtgctaggttagaactggcaaggtctacctctcagctttgttgaggatggaaggaagttgatcactcatggatttgttaagacaaaactctttgaatatgttatgattccaagtgattttacactctagctggaagaagacacagttctgcaagaaactaagtaattcaagttgctcaacaacaacaagaaacttgtcacctcttaaataatattttcttaaagaaactgtagaaagcaagcaagaagatatttatgtagttctgtgagatttagtatataattagatatatattgtcacatatatatgcatgtgtttaaatcagatatatctcctgagtggagtctgtatttcccatacactatattttctatgaacctccatccatatatcatacttcaagctgtgttctgctagacaatttaaagccctacaaatttagaaagtaatgttttaataaaaatgcatgctattattgattgctgtcataatataaccattgttttgctaactctctgatttacatgactgaaaactctcctataattagttatttcctaaaatttaaggataatagagcagagggccacaagtgtttgtttgtttgtttaattcctatgaacatgattttcccttgaataagactttgtgctataatagattttctcctaatgttaatatgatttatgaaactggtattgaatattttccttcaaatttatggcccgatggatatcatgctgagtttaagatgctgagcctaatgatattcacattggtggcat

SEQ ID NO: 96790 - DNA, 13277 bp, Homo sapiens
ggaattttgctacaaaaaaaaaatatataataagggtcttagaagtagaagagtttacaagacacatgtctttattctcatgaggcagcaacctggctatgggctgtcgagctgacataattcagggtttccagcctcttctctttcttgccatggctttatctgggtggaattcttaactcttacctgagataaattcagatttacaagatctctagagtagcagtatggcctgtggttcagagcatggactctgggaatgactgcctgggtttgaatccagctctctgtttttttttttttttttttttttttctgagacagagtcttgctctgtcacccaggctggagtgcagttgtgtgatctcggctcactgcaaactctgcctcctgggttcaagcaatttctcctgcctcagcctcccaagtagctgggattacaggcaaccaccaccgcacctggctaatttttgtatttttactagagacggagtttcaccttgttggctaggctggtctggaactcctgacctcgtgatctgcctgccttggcctcccaaagtgctgggattacaggtgtgagccaccgcacctggcccagctcttgttgcccaggctggagtgcaatggtgcaatcttggctcactgcaacctccaccctccaggttcaagcaattctcctgcctcagcctcccaagtagctgggattacaggcacccaccaccgcgcccagctaattttttgtatttttagtagagacagggtttcaccatgttggctaggctggtctcaaactcctgatctcaggtgatccacccgccatggcctccgaaagtgctaggattacaggcctgagccaccgtgcccagcctcagctctcctttttataagctgaatcatcttgggcaagttacataaccaatctgtgtctcagtgtcttcagcttaggaaaacaaggtcattgttaattagtgaatcagttactatacagtaatgaataatgtcttattccttataaataatcaaattttaaactattacgattataatagtatcattaagtctaatagtttcacttcttccttaataccactttacaaacctccctcatcctcagctctggcctgggctatacctctctttacagaccccaggtctctgcagataatcccttagtgtccagccacccaggtaatggacactttgccctaactggcctcaaagagccatttctggagctgcaggccttctcccctaaacctgctagttatttatttcatacctagatgcctccctgaataatttctttttcttttcttttcttttcttttttttttttttttttttttaagagatgggggtctcaggccaggcgcagtggctcacacctataatcccaacactttgggaggctgagtcgagcagatcacctgaggtcaggagttcgagaccagcctggccaacatggtgaaaccctgtctctactaaaaatacaaaaaaaaaaaaaaaaaattggccgggcatggtgacacatgcctgtaatcccagctacttgggaggctgaagcagaattgcttgaacccgggaggcggagtgcaatgagctgagatcacggcactgcactccagcctggatgacaagagtgagactctatgtcgaaaaacaaaaaataaagagattggggtctcactatgttgccaggctgatctcaaagtcctgggctcaagcaatcctcctgcctcggcctcccgaagtgctgggattacaggcatgaaccgctgcacccagccctccctaattaatgtctgacccaattccctccaccctgttctgtttggtgaagatttctttttttttttttttaccaatgggttcctaaagcagttttatgctttggtaaagcttggttgttaaacctgttgtttgaaactctgttctggctcttgcctcacatgtggccatgtggccttgctgccagacagcagccttccttctgtatcacaacagctttttccacattcagaggcagagctctggcattcttcccatttcaaaacccttgactccatatcagattgcccatacagtccctcttccccacatgagccctggctactccttatcttgtccggaaagaactgactgacaggtgctgagctcaccgggaaatttatttcaaatttcaaaccctatgtactgctccttgtcttctgataatactcatgtgacccctcttctatggactgtcccatccacttcctcacctcaagcccaagaaaacttttggtatcctttcacaagagtttgtaacacagaaactactttgcatgtggcaactaagaaaggggtcattcatttccaatacccttctcaaccccttgcctatacataggcaatatcaccatcttctccccaaactcttttcccccaggtcctggtctctgtttcttcctactgcgtaccatgctgtatagttctgttaaccttaaaagacagattgcaaaatggaacagaagaaatgagacagaaagaggaaaatgaagtatatgaccaggcagatggctggtcaattactagaatagaagctctcttttgtgtgtgtccataaatacagaaaaccttcctaaaagcctgaccgctggtgggcacttggagaatgcttgcctggatggattggtgcttctgcccactgctcttccagtgggaagggtggtagggcaaagagtaacctgcccaagggcctggctcatgtaagttgactgacagctcttctcacgctgattctgacgtcttcctcttcgctgcgcttgttttcagttcatctccgcaatacctacccgatccctgaagttcctgaaggaggctgggcatggcaccaccaaagaggagatcaccaaggatgccgagggactggatgagattgaccatgctgagatggagctgcgccgaggccagatcctctggttccggggcctgaaccgtatccagactcaggtactctgatagtggtctgtccttcccttgggagaagcagcttcccatcttggaaggtgttgggagggtagcagttcttgtcggccagcatctcttcccttccaaaggctcactactgatgggcagccctagatcctcagcttcaggacagacacgcaaaaggatctgtgtggggtcctctgagaggagaggagtcaaatgacctagaccatgggacactattagcatagtcctttagctctgggttgaccctaaagcccagcctgccaccctctatcaaatgggcaagcttcagcataaggtctcttgcaagcactagacctgaccccagggtgggaaatgctcagtttttccctacccttcagaaggaaggagttagacaatatcaatatgccaacatacccagcattcacttaatatagcttcctcacactgccattataggaatagatgctatctggaagggtctttgtaaaagaaactcaccttgttatatctcccccattcaaagtgtaaggccatggtggggaatctgatggtttcatgtgtaaaaatgacaatagtctcttgatgtctgagcatcttttgcaggattcagacttgcttcctgacaaggaggaagcaataatttcttcaagcctcttcccttcttgcaatttctgaaatgggatagaagccacccctgctgctcttatgtcccctgtctatagccccacaataacttttattttttccactttccatgcatcaattgtaactactttctcctgggtgaatgcgctgatctaagcattgataattctgtcttcccctgctctcaccccccatagctttattgttttaatcctgagattttccatttcaaaaacactgtaaattccaagatctcaagggtggtctccagaaaacaggcgtatttctctctgctgattggctagagatcttcaaaataagtttcactgtctaaaactggccttgcaaatgttttagaaagttccccagtcggccaggcatggtggctcacgcctgtaatcccagcactttgggaggccaaggtgggtggatcacctgaggtcgggagttcaagaccagcctgaccaacatggagaaaccgcgtctctactaaaaatccaaaattagccgggcgtagtggcacatgcctgtaatcccagctactcgggaggctgaggcagaagaattacttgaacccgggaggcagaggttgtagtgagctgagattgcgccattgcactccagcctggccaacgagagctaaactctgtctcacaaaaaaaaaaagactgggcgcggtggttctcacctgtaatccagcactttgggaggccaaggcaggtggatcccctgccttaggtgaaaccccgtctctactaaaaatacaagccaggcatggtggcacatgcctgtagtcccagctacttgggaggctgaggcaggaaaatcgcttgaacccaggaggcggaggttgcagtgagctgagaccacaccattgcactccagcctgggtgacagattgagagttgtctcaaaaaaaaaagagaaagaaaagaagttccccagtcaatcccacctcgttagtgtataggagagatagatggagtgaatattctaaactatatacctggtaggaacttatcccctataggcaagacaacaaatagaaaagtggaaaagaggccgggtgcggtggctcacgcctgtaatcccagcactttgggaggccgaggctggcagatcataaagtcaggagttcgagaccagcctggccaacatagtgaaaccttggctctgccaaaaatacaaaaattagctggacgtggtggtgggcgcctgtaatcccagctactctggaggctgaggcaggagaatcgcttgaacccggaaggctgaggttgcagtgagctgagatcgcgccattacacaccagcctgggcaacaaggcaagactctgtctcaaaaaaaaaaaaaaaaaagaagaagaaaagtggattgcagactcactatgcacctgactgtacttccaggcaggtgctttttctgtctgccagagaaacattccagggtgctgtggctgcctcacctatccagggcgatgcagctccctggggacacaggtgcttcctggggagccctgagcacttctccgtgttgctggcctcacatccaattgggcaggcattggagtccgggcactgcctggagctcaccagaaggtgctttacagtggtccttggtttgtctctcagagggcttggtcccctctgctgtgaggctggactgcagctgtggtggcaagtgaccagatgtcactgagcagcctgaccatggtctaggtggtgcttggatgcatccacttggcttcctttggtcattgagtttcaagaagagaaactccaggagacggcttggccaggatcaggcaaaaacaatcatgccgaaaaagtggcagaaaagcttgaaggtctctcagtgaaggaggagaccaaggaggatgctgaggagaaacaataaatcgtcttattttatttccttttcctctctttcctttcctttttttaaaaaaaaatttaccctgcccctcttttttggtttgtttttattcttttgtttttacaagggatgttatatgaagagctgaattaaaaaaaaaaaaaagaagaaaaagaaaagtggaaaagggctaggtagggaaacgctagggttccttttccctctctcaagttcctcctctcagaaagaaaatttccagcgggacctacacaaagtgcctcgtggcatccaggcatccagaatccccacgctcactccctaccccaccccacactccaggctgctgactccaagtacccatagaacctggcgcctttggctcccatctctaaagcccccagtgctttcctttgggtctgctctttccaaaataacctgtctttgctttgtttttcttcaggatcaaccacttctactatgtgatttcttttctcctagccaagattccytcagtccagtacctccttgctcctttccagtcttctgtcctgggaggctgagatttatgggtcttccttgccctccactaccaatttctatttccttgactatgcccctctctacaaggtctttttggtttcactgcctacatagctttaggtatactacctttccgcattgttggagcatgaggcagttgggccaaaatggcattaaagcctaaagtgaggcatgttcaagatgccacagtgaccaaattcacgccatccaggatgcacctgactctggaagctgatgaggctaatgatgctaaygtgtatcctggatccctgaggtccgctcccaacatcagcccttcagcctcagctgggttctaacaaaaccccctgccacctccacgttgatctttgttgtcattctcatcgcagtgctttggtatgggaggtgttagaaaacttagagactagaattgtggaggttgggaccttgtaactccaataagcactgaagaaggtgtctctacagtcccttcttccatggagctggaacccccgcacccaccccaagtgtaaaccctctcctcctgcaggttcaagctcctcagtcccagggaactaaaactgaataatgtgaggaagcagtgatgtttctgctcaaactgtgatctggatccagaaactagccctaaacagctcatggcttctcaggaagctttataaaaggactgtctcactcacattctgcctactttcccatcttccctcctgggaaaatgaagtccagttaatggaatcagcacctttccttcattcctggtagattaacccttggcattaagcagatagatatttctaagattattctaccagattcatgaaggctaaagggaattccttttgattttgtccttgttacttaggggtcagggataaggatggtagagttgattgaggccctagatcaggaccattgtcagaaaatgaatggcatggccgggcgcggtggctcacaccttaatcccagcactttgggaggctgaggaaggcaaatcacaaggtcaggagttcgagaccagcctggccagcatggtgaaactctgtctctactaaaaataaaaaaattagctgggcatggtggcaggtacgtgtagtccctgctactcaggaggctgaggcaggagaatggcttgaacccagcagatggaggttgcagtgagccaagatcgtgccattgcactccagcctgggtgacagagcgagactctgtctcaaaaaaaaaaaaaaaaaaaaaggaaggagggaggaaggaaggaaggaagctgggcacagtggctcacgcctgtaatcccagcactttgggaggccaagaccggcggatcacgaggtcaggagattgagaccatcctggctaacacagtgaaaccctgtcactacttaaaatataaaaaattagccagcctggtggcgggtgcctgtagtcccagctactcaggaggctgaggcaggagaatggcgtgaacccgggaggcggagcttgcagtgagccgagatcgcaccttgcactccagcctgggtgtcaaaaaaaaaaaaaaaaaaaggaaggaaggaagaaaatgaatggcattaattgcctctgtctctgaggaacagggcactgaaaaccagaggctacttgtgtaagcctcgacctgtagctgtttcaaccaccaccaaccaaaacctcttcctccccctccctcagtctaattgccgagttactgtcagcatttctgccagacatttcagatctctaatgcattaatgcacttagtagcattctcgatagtgggcttggccactgggttcttgagctccattctcagggagcctacctacttcagcccagggaagggatagctcagacaagatacccagaggaggatgagcccagcaactcatggcccaggggtctttccatcatggccatttgtatattggctactaaatggcccctgttttttatttaaacacatgagttattttcctggaaaatccgcaaaaatacgtagtcggtttaattgatttagaggttcctgagccttcaaattcagtaatacataatttgccttcagaatcttcaattgtttgccttatttttaagagtacaggtaaaaaggggcctgtaggtggaggttgcagtgaaccgagagtgtgccactgcactccagcctgggcgacagattgagattccatctcaaaaaaaaaaaaaaagtacaggtaaaaacaacgaacaatcgctgtctagctgttaggagtgatggagtagggaaaagtccctttacattttaaatactcttggccccctctaaacctcaaatgcccactgtggattcaaagggaagaaaaaactagattctggctgggcgttgggactccatggcaaattgttccctaagtgaagtatgatatgcaattaacgtttttctccttctcctcaccattgctttttgtgggagggaagctctctcttgctctctcctgtccccttttcccatctacttccattcctgcttccccaaccttccatgaccctcccttcctctttcttcacctctctcggactgactgtggagcaaagctgtctcactctctgattctttgcagatcgacgtaattaacacattccagacgggagcctcttttaagggagtcctaaggcgacagaacatgggtcaacaccttgatgtaaaacttgttcctagttcatcctatgtagcagttgcaccagtcaaatcttcccccaccacttctgttcctgctgtttcatctcctcctatgggcagtgagtgatagtctattatgatgcatgatttgctaaaatgaccacaagagagcacgtggcatccactttaaccaaccatggttatcttttccttttggtttttccctttgatattttgacttaagggaagaaaaagacaaaaatcctactctaaaaccagactgtgtgcccttgtattttatttttgtaatgtagaaaagctattaaaccttaactgttttaaagacaataattctgttttctgattgttcctctgcattgctcatttcttccttttcttgagttttgttttgttttgctttgccttttttgtttgtctgtttgttgctttgctgggatatgttgttgttcctctcttctcctcctgctcctttgagtctgaactctacctcctaagcttagatgtgaggttaggccagaggaaaacccaagagctttctttacatgggggcaaagtttgggatcttttgaggaaaggtaggaagggagctaatgtgcccatgggtgtgttttgactagtggacctgtcataattgagccagtattaaacttggtcaataataatagtccatttggccaccactgtattgctgactggcaattttagcataaaagttgtagctggctgggcacgatggctcacgcctgtaatcccaacactttgggaggccaaagcagatcacgaggtcaggagatcaagaccatcctggctaacatggtgaaaccccgtctctactaaaaatacaaaaaattagctgggcgtggtggcgggcacctgtagtcctatagctactcgggaggctaagacaggagaatcacttgaactcaggaggcggaggttacagtgagccaagtggagagccactgcactccaccctgggcgatagagcaagactctgtctcaaaaaaaaaaaaaagttgtagctataggtgaagaaaagaaagtagttcagttcaaatgtatatggttgaacatccccgttattttacttttctgggactccggtttaaaaatcagttaatcttggctgggtgctgtggctcacacctgtaatcccaactttaggaggccgaggtgggcggatcacctgaggtcaggagttcaagacctgcctggccaacatggcgaaaccctgtctctacaaaaatacaaaaattagccgggcaatatggtgcgtgcctgtaatcccagctactcgggaggctgaggcgggagaatcacttgaacccgggagtcagaggttgcagtgagccgagatagcaccattgcactccaacctgggctacagagtgagactccatctcaaaaaaaaaaaaaaaaaggccaggcacagtggttcacgcctataatcccagcactctgggaggccaaggcaggtggatcataaggtcaggagttcaagaccagcctggccaatatggtgaaaccctgtctctactaaaaaatacaaaaattagccaggcatggtggcacgtgcctatagtcccagctactcaggatgctgaggcaggagaatcgctggaacccaggaggcggaggttgcggtgagccaagatgctctactgcactccagcctgggtgacagagacagactccatctcaaaaaaaaaaaaaaaaaaaaaaacgaagaaaaaaaatcaattagttcacatgaaggtacgagaaatatacaaaagagtcaaaataacattttttcttcatttactaaacttttaggagtttctgaagaggagtgccttttattttgcttctccttttctctagtttgattgtttcaccaatagccagcacttattttgcacataaagtttcaggaagccctttctcagccggacttgcaattggagtattatcaactcacaacctaagatctggtgttcccattggtagattcttggattcttgctaatgcttatgtcttcctattcctggtcattttcccttccccaaatgggactcagagaggagagagaaggtagccagctctttgctgataatgtgggaaggagtttatctgtattaaatataatgtgggtttcaaatagctgagtgttcagtctgttccttcctcccccattcccaacctcaccaccccccaccccgacctctgcaaaggggctcaagaaagaacagttgccttgtctgtggttcacatgatcacggactgtgtgggttgaccagacttagatttgttttgtctctttagccaaagtgttctgatgtgaggaatgggggtggaacttgatagagatacatacaatttctttaggtcaaaaaaacaggcaagaaagaactcactaagtcttgccctgcaagtatccaggaacctctcccaccagttctttcatattcctctcttaattccttttttccttctagttctgccatccccttctaactagcttctgttctgttttaatcatccctttctgataggaagggttagtgtcagatatcctgatggtttgatggtggaaggagactaagtagaagactaagcagaagactgggatcttgtagagcagctggtagagggtgtgctccaaatcctcaaagactagatcagaggagagacaggccacacctgctctttctccagctgtgcctttttagttggagctcctagaagttatagccatacattttaaaaccctctttcccattccagatctccaaatgaattcaactgtttgtccaaccttcattagatagatctctaagatttccctgcatagggaggccctaatccttttcttctggtttctgaaaagagcagaaaactgcctggcgcggtggctcacgcctgtaatcccagcactttgggaggccgaggcaggtggattacttgaggtcaggagttcgagaccagcctggccaacatggtgaaacctcatttctactaaaaatacaaaaaaaaatagctgagtgcggtggcgcacgtctgtaatcccagctactctagaggctgaggcaggagaatcgcttgaactcgggaggcggaggttgcagtgagctgagatcacgccattgcactccagcttgggcaacaagagtgaaactccatcccccccaaaaaaaaaaaagcagaaaactacagaatgagaaaatggagtcttcacctgcccactcattgagctgcagagagtagccctcagcactcatacccagtctcctgagtcatgaaaagagttgcccttcaaccagccacttccacctgtaggccagggccccaaaagagacatttccccaaggttttgagaaatgatgaccaggaagggaagggttgactggctgtgtggagagtgctcaaagctttccctgcaccttcttcactagccctgtcttgtccccatacactgctcatgcaccaggcatcatgctccaggaaggggagatgccagccctgggtggattggtggtgatatagtgcatgattgttcatcagcatgtgttctctgaggccagtgctggagttggggcatcctggcacagccccatgccctctcctccctcacccttctctccacccaccaagccagctggtgctccctagctctctgacccctcttcacgtgagcttccttacaggtggctggtttccctttagattccagaagtcctgcagtctagctggatgactgtttcttgctccccaaaagacatttcccatattttttccatctacccatccccaattcacttttatcttcctcattgtttacctgtaacagtattattggtcaccccaacaggtgagaggaaaagccaacaaacagggctccagaccctcactccaaccccagttgttacaaatttattttctatagtggacttcacatgtaattttttccaacaaagtattcaattgaatggaagcaggaaattgaaaatcactgatattgaagatgatgtactggcggataaaggcacctgccctcctgtaatattcagtagaaattttgagatcttgaaaacatatgaaaaatgtgggctatgttatcactcctgacagtgatggctttgatggagtgggatgactttggacccatctcttggccagtgtatctgtgccagggtcaaaggagaaggcactgggtttggactcactcaatccaaattgccttgctctgagattttatgtagatcagtgaaaacttgagacttcctgaagaccagatggagcctccattccatctgatctcacctagatctggagcaaaggcaacatgataggtaaaatttgcacatcagatggtcaaataggaatcagataataaaaatgtggtcctcgctgtctgttcagcatggtgagtgtgtgcctgtgctccctgattcttcttggctgaggtgttgagctgatactgttgagtggcaaggagtcctttgccttctgagctttgagcaccctcagtcttgggtgggtctgcaggctgtagtagagtgggacgagata

SEQ ID NO: 96791 - DNA, 35032 bp, Homo sapiens
tcagcctcctgagtagccgggattacaggtatctgccaccatgcctggctaatttttgtatttttagtagagatggggttttaccatgttggccagctggtctcaaagtcctgacctcaggtgatccacctgcctaggcctcccaaagtgctgggattacaggtgtgagccactgcgcccggccttcagaccatcattgtgcccattttacagatgcaaaaaaacccgaggaccagaaaggtgaagtcacttgcccagagctaccagcaaagctaggatttaaacccagtcctggaaaaacgacctttaaaaaaaaattttttttttgaaaagttgttttaatacagaaaactaaaataatgtggccatgcactcctgtcctggccaaagccactgtccccaaatgaccatgattatcagccatgctcttaggaactatgtgggttgaagacacgcctgtcgttaacagcctgggatgcatctggccatcagcctggaggaagctgagcaggtctgaggagggggaaagtgtattgggaagggactcagacaaccacctgtcccccggtctccctggctggctggcagagggcccctcaccatctcgtggcaggcccggctcttgagggccatggccccgtacttgctgtagcacgtctccccgctgttccccgccaacaccgccatgtctgtgcaggtcacacacagcaaccctgcagagaggggctgggcagtgagaaccctccaacaccccaagccctgctcccaccccagtgccatccccacctcacctccttcactcacagcctgcacagctgcatccaggaaggtggctgggctgccataggggtccagatcgatgacgtcaaacctctccgacaccctctggtgctggtacatcagcatcctgggtgcaaagagggccaggtcctcagcctcccacgccaggtaccttctctgtcccctacacatattaactcgtacagcacagtggtttgggtctgaactccggggccagattcccaagttcaagtcctggctcagtcatttatttatttatttattttatttttgagtcggagtcttgctctgtcagccagctggagtgcagtgttgtgatctcggctccctgcaacctccgcttccccagttcaagcaattctcgcgcctcagcctcccgagtagagtagctgggactacagacatgtgccaccacgcccagctaatttttgtatttttagtagagatggggtttcaacatgttggccaggctggtctcaaactcctgacctcaagtgatccatccacctcggcctcccaaagtgctgagattacaagtgtgagccactgcactggccttggtcatttattaaactgcacaattttcctacttaggaaaagcaccatgtggaactcagtccacacatctaaaacaacaacaatactgatataagacgtatctgcctgacaccatttcaagcagtttatagatgtattaacacattttttttttcctttctttggagacagagtctcgctgtgtcacccaggctggagtgcagtggtgggttctcggcgcactgcaacttccacctcctgggttcaagcgattctcctgcctcagcttcccaagtagctgggattacaggcacgtgccaccatgcctggctaatttttatatttttagtagagacgaggttttaccatgttggccaggctggtctcgagctcctgacctcaagtgatccgcccacctcggccttccaaagtgctgggattacaggggtgagccactgcgtctgacctcattttaaaatttttgtagagacgggtttcactgtgttgcctaggctggtcttgaaatcctggcctcaagcgatcctcctgccttggcctctcaaaatgcttgattacaggcatgagtcaccatgcccagctaattacttttcattgtctgtgattactatttggattctagtaaggtcagaaaagtaaaaacttttttctctgtaaaaggtcagaaggtattttaggctttgtgagtcatatgtggtccctactgcatagtcttcttttttaacctttaaaaatgtaaaaaacattcttgggttgtgggccattgataaactaggctaggccgggcgcagtggctcacgtctgtaatcccagcactttggaaggccgaggtgggcagatcacttgaggtcaggagtttgagactagcctggccaacatggcaaaaccctgtctctactaaaaatataaaaattagcctggcatagccaggtgcagtggctcatgcctataatcccaccactttgggaggccgaggcgggcagatcacgaggtcaggaaatcgagaccatcctggccaccatggtgaaaccccatctctactataaatacaggtgggtgtggtagcagatgtctgtagtcccagctactcagtcgggaggctaaggcaggagaatcacttgaacctgggaggcggaggttgcagtgagccaagatcacgctagtgcactctagcctgggcaacagagcgagactccgtgtcaaaaaaaaaaaaaataaataaaaataaaaattagccaggcgtggtggcacgtgcctgtaatcccagctactcgggaggctgaggcaggggaatggcttgaacccgggaggcggaggttgcaatgagctgagatcgtgccactgcactccagcctgggcaacaagggcgagactacatctcaaaaaacaaacaaacaagcaaacaaacaaaaaaaggctgtgagccccacaggctatagtttgccaactcttgcgaaggtcaccaattttgcatgttttgtttcctgatgcatttccagttcttgaaaacggtgcctgacacatagcagacactggatatactatggctcatttgaatgaataaaaggagtgtaagaagttaaaacagagaccaggatgctacttatttctggcacagagtatggatcataccataattatctattactcatcacagcaacccctgtaaaactaattttctcagttgacagacaaggaaactggggctcaaagaggctaagtcactcactcaaggtcacagagtgagaatgtgacagagccagaatttgaccccaggcaggcttgtcccagagctaggctgtgatgcccagaacctaccgggcatctgcttggctcggctgtaccaggtgggccacgtcattgagctggacattccggcgtatgagatccacagcccgggtggaggcatcgtttgcaaccacagatctgagcccaggcacctctagggcaaatcgaatggaacgtaggcctgaagctgccaggccttccagcacatgcaggccttcctgttggagtaagcagaaaacctccctcacatctccacctccatcctcttctgggccccaaggagcccccaccacccacctcctatagctctccccctccaggagccctctgtctcccgctaaattccagggctgccagctcctatgctcaggccccacctcacagatctcccccacggccgctgtgcgaggttggtctcctgaggccaggttttcactctctttcagttcaaccttttcctcctcttgctctgacaagtccacgaccactttttgcgtgtccttctctcctggaaccttgactgcagccacccagaggcacaagtcagagaataacaaggtcccctctgagaaacctccccttaatctccaaaatatcgtccctgaaatccctgcggaaaggctgaaggagcagaacccagggcctgctatgtggctgaagcccctctggatttgggcggcagaagagcccaggcagggagataaacttgtgtgacccccgcccaccagaagcctggacctccactcactctggattcctttggccccaagctgaatgcgagcaaactcggtgatcacagcacatctggtgggagacagaggactagctcataccccgcccccgccatccacactgacccactagccgatgccaggctaacgtctgacccctgctcacgtcaggtcccgattgaattcctgcaccgggttataaaagacctcgttggcactgggaaaggcgattttggcagccccctcggtgactgtcgtctcctggacttcacgtggacgttcttctccgtagggcccggtgccgttctccatcgctgctgtattcggcagccctggagactgccactcgaaaaaccgggctctagagagcacccgggcggagcggaaagtgaggcttagccacagagacgatccttgcatgagacatccgctggcgcctccgcccgccaagcctggttcggggggcgggggagggcacagagagggtcagagagccgcattccgggcccggggatgtcctacatatctatgaggtagggactaggaaaacctgcggcctcggtaagctgatatcccctcgttttggggatgactggtccctgtggagccgatgccctcgtgcaggcccgccccgagtccgaatccctccccgcgctgcctagcccgtcctcacctgctctcgtagccacagaaaaccgaattagtcaaggtgcacgtttcccgaattaggacctgggcgccgccatgttggcacagtgggtgggcgaatcacatgatagtggttggccagtcaatgaggaaacgtacggtgggcggccgggatcaaaatgaaagccataaaggaagcgcgctgatcgtgctgttccgggggtgttaatcacagtggatcccctgggagaggacacgtccctagtcccatttcacagatgaggaagttgtggctcagaaaaggggcggtaagcggagaaacccaacacttattggtcctcttctgtgttctgggtgctatatacacattatttcagagcaccctgcaggaatgactcaggctctggagttggatttaccgggtttgaatctcagtcccatcacatgctctgggcaggttactcccgcggcttcacttttcttacctattaaatgagaatcgtggtttctcagatagagcaaagattaaatgacagattcctggaaagtgtgcaaagaaccactctaacattgtaagcgctcggtaaagttctaaccagtgtatgaaggcaggacagcgaagtggtcccggctacctgggttccagtctcagctcgccctgcgacttgttaactctgaacttaagttaccgcttttgcaaaatgggcagaacttttttttaccatttgttactgggttgtagtgagaagtaaacgagttagtgcaggtaaaatgctaacagaacctagcatccggtaagcatcataaaagtcttaggtcttattgtcgcttttgagcctgtgtttaaatcctggcacctaccatcacttccttgctgtgtgatgatcttgaccagctttcttcatttctctgtgcctccttttctttctttctttctttttttttttttttttgagacggagtctcgcccaggctggagtgcagtggcatgatctcggctcactgcaaccaccgcctcccgggtgcaagcgattcttctgcctcagtctcccgagtagctgggattacaagcgcatgccatcacgcccggctaatttttgtatttttagtagagacagagtttcaccatattggccaggctggtttcgaactcctgacctcaggcgatccacccacctcggtctcccaaagtgctgggattacaggcgtgagacaccgcgcccagctgcctttattttctatagtgtgtctgtaacagttctcactaaaaaatgttactgtgtagtttaaacgagctaattcccataaagaatgtaacgcagtgcctgccacaataaacagcagtcattattgtttttgttttacaggaaactaaagttcggaaaggtagagcgacttgcccaaggtcgcgggactagaaggtggcggggccaggattcgaaccatcgagctgagccgacgtactggcgaggatcccccaggggcatagagaggagacggagccggttagaaggggcgcgctcggagctcggctggcctcgcctggagggcggggcccgagggcggtgcgcgggcggggccggggccgctcctccctggcctggctgcggcggcagcgcggcttgcgctcgctcggcgctcggctggggcggcctggcccacaatgaatggccgccgcggctgccgctgctgctgaggcggaggccgcggaggccgcggaggcggaggccgaggccccggcgcagcggggcgcgccccgggcccaggcccggccccagccgccgctgcggagcccgccgggaccccccggagcgcggccacggcgcaggtgaggcggcccgcctcaggcccggttccggcctcctccagccggggcggcccgagggctgagtggggagggcctgggtgctttctcggaccgaggaggagccgggcccgcagcctgcactgtgcccgggcaggcgagtgtgtggaggcccagctaccgcgggcggccttgagcgtccagcccgagcttcagggcttgggggcggcaggatcgtacctggaccgctcccccgtctcccagcgagggagggggccaggtcgggccggggcaggtaccggggatccggggaagttggagggtccgaggcggaaaagtgaggaggttctcgtggatgccggagggggagggggagggggaggaggagtcgggctccggccaggccgagtgggggaggagaggagagcggcgcggccggaggggggcggggaggggccgggcctgcaggtaccgcctgggcgctggaggaggtgggtgggtcaagttacaggcctgggggcggctgaggagaagcccaggaagtggggcacggcgggtgtgggcggagttacttcgtgtgggggcggataggagatcccagagatgttttccgggggtcacatgaggtcaggactcagatgtggggagggggaggctagatgtgggggcgatcaggtaaggtgagggactgctgtaggagttttgggagtcgagagagcagagccttttgggctaggctaggggggatgtgggggcaggtcaggaaaagctggtgtgaccagaaggtatatactaagatgcgccccccaccgcccccaactcaagtgttaaggggttccgtctttctcacacctcatccctgaagcctctagagtcctgaccctaccccttgggcaagcctctgccaactgttcaaaggcactggccagtgggtgtttgtgtgggcagctggagacagtctggaacacctagcttaggcatcttgtttatcacaaggtggcccttgcccacccccaccttatatatctacagggaggcagcccagcagacgttacctgggtattttaggatcctgcattctttctctaccttttgtggccagaagctggtggttcaagcctagtggatgggacctcacagcaaccatcgtatatattagtaccatggcctcccaggcaccaactccttgagcckgagttctgtgtgccatctccctrggggtgaagaattagagggaatgagcatgtaaaactctgttgatggtggtttggaggctcccgacggggtgaaggcagggcacagagaagagttaaggggatcaaatcaggcactcacaccctggcccagggatctacctctgggacactcgtcctgggccaggccctgtgccgagctcgctggtcggatgagctcattgatggctcaccaccaccagttcaacttaggccttctctggggtccagacgaggaagctgaggctcggggtggtgtggcttgtctcagatcacatgagcagacagtggctgaactgggattgtctgaccctcagcccaaacccatagtcactcaagtggccttccaggagggtgactgaaggagctcctcgttctggattccctggcgggcgttctcctccgtccaggccttcccttctgctcaccccgggggatgggtcaatcccctttgggacagactgagtttccatggtgtccccggggaatggaacagtggaggtatctttctcggaggcctggtcaccccttcttccccatttccctcctgggagccaagaggtcaggagtcatggaactgtgggctgaccgtgggaagctgaggaggcctggcaccaccagggctggacttgactttgcttgcctagactgtttttgccccactttggcccccagtcggatggcagcagcttttgttcctttctgggctaattgcaaggctgttaccagggtgtccttgggactttgatttgggatcttcagcacctgaggcaggagccacaaactgctgggtcaagtggtgtcagccagttctgggtttaatgatgggttgtcaccctaattctccccagtctccctatagttcccaggacaccctccaacctgggccctgcccttcttgcctgtctggctagccacttggttctaggaggagtaggaactgggccagcagtcccgcaaagagactgaaccatccttcctggctggttgggccaggattgctgcaggtctgcttcagcacagactgggtcctcctggacctaagctgggttggataccagggataggggattggtggtaccatccagtcacttagctgagactgttgggagttggccctggtgagtgggggacaggcagtgcctcaggcagctccggtttgtgcctagaggtagaggagaaggcaccagtaataactgcttttcggtgagaacttagcatgcacagactctgtgggggcaagtgcaacaagtaggcagcccgttgagacagttttatttcactgctgggtgctgactccccgctgggggctggggaagcatcccggagtaacagatccagagcagctagctctcaagcgaccaaactttcacaagcaaaggatcaagataatttcacatacytctgtgtttacaaagatggtgtagcaaagtgaagtcatyatgagccatgaggggatggggaggtttcgatgggtggccggaagtgttcccggagagctaagatctgaataataatrttagctaaggggtgggtggtgctggggcgcagggaggggtcagtgttctaggctcaggggacagcacattcacagcttttcttgagtatgtaccagtcttcttctgagtgctctaaacattttgtcttcatgagggaaggagtggggggatgaccctactgtggagacagagactctagtaccattcacaagagagtgaagccctgtctctgggtctcctggatctgcccatcacccccagatggaagttcagaaccccttggcctgcatctagggtatttaaaaaatctggcctcctggccgggcagcagggagccccagcaggttcttgagctgggctttgaggagatgtgagttttggtcagccttacagggtctattgaaggagtctgcctggaggccygggggtttggagagagtttggggttggcccaacattgtctgaccctagatttcatcagtgtcattgccagagcctgtgtggagagagggatcccatcaggcttggtggggcatattgcttttgggatggtggtgagccaccggggctggaaaacatgagtcagtgttcatgccactctgcgtcctcagatcctccgtgcccctcgtttctcctcctaggttgctctcagcacttgtacacactcgaactcatttaagcccgtggctagcaggtcctgcctgttatcatcatttgacacacaaggcaactgaggcaccctagtccttccttcacacaagctgcaaagtggtctggctaccacccctgtgccgccttccagccactttcatgttcctcgtgtctgcatttgctcctcagtcctctcagccgctactgccttcccctagagaaccctctgggccgcatgaggtggggccgggaggtgggactgggcctgcttgcacattaggtggggtgaggaccagccgagccggcagaggtgacgtgtcttaggttgtgatctgtgtgtggttgtggtcatgtccctccagccttctcatgtgctgcctccttggcgaaggtctcagttcttagagacctgtgcgtcttctctgagggctttgactgtgtccagttcgtggtttctaaatcgagcaaagggagagggtaggtaagggtgagcagacacggtctagtagagagtgaaatttcacacttagcaccacccctgtctcagccatgagactctgggcaaaggtctttacctctgagcctcagtgtcctcctctgataaggagtgacaagtgggcacaactatactgctgtgattcgcaactgggtacagtcctacctccggggacacttggggaatgtctggggacatttttggttgcccctgccgggggggggggggtgtgctgctggcatctagtgggtttataggccagggatgcggttcaacatcagacagtgtgtagggcagcccccaccacaaagaatgattgacgcaaatgcagtggctgggtggggaatctccactgtctggttatcatgaggtttgcgggagaggttggcgtctggggtgtgagtggacagtgctgtgaaggctctggggaaaaccccagcgatcactgcctgttaatcccatgaaatgtgcgaggtctgggagatggtgagaggcataagatgtcttctactcccagggagtttgcggcccagcacggggccaggggatacgactaacagcagctggcattcatgagcaccgactacggggygagcgccgatcggcctgtgttctttggttgtttaatccttgaaatagccttgtgaggtggctgctgctgtcagcccattttctagatgggagactgatatggggggtgagcagtattgagggtaattctgagtgacaagctctataagggatttgagcctagtacaatagtaggattcaaaatcttaggtcctgcgtggttccctagcacagcccagcaggcccctctcccaggatgatccccatccctccaccctcctttgtgttagcggcaccagggtcacctcagggcctttgcacttactgttgttccctccacccttgkttgccgccactgctgccctgtcttttgggtatgatctgattacacgcagggagtgggatgtaactccgaagggtgggcttatggttggagttggtggggagggagcgggcaggctgcgagctccatgaggacggaggcagagcttctgccaggctctccaaggagctggagctgctgcctgcaaagggaggccagattgccgagggctgcgaggaggagcgagtgggaggagggagaggcagcacgcggagactgctcattcccggagatggtggttgcagggagaaggggctagagaatagctgcagttgggaggattgggaaaggaagaatgaaaagaatgaagaaggccttccttggggattagagagagggcaccccagaccctgaggtggaggtcctcagacaggcagaagaccctgtttctggagaggacacatccagtagctcaggtaaagagccccagctctgggctcggccggtccggggttcccgtctggtctctgccttgcttctctgaacaccagttttcccacctgtgaaatgggtctagtcacagctgcctcacatttttgcctgattcgggagccagacggcctgggtataaacctgtgcctgccattcaccagctacatgttccccacctctggcttcacctctctgggcctcattcccatccatgaaatggcaggcaggctcatttcttcctcagaaactgtaaagaagagtaagttaaatgagcctgtctgagccctggccaggtatgggcccagtcagtgaggcttgagtaggggacactgttactaatcctattccaccatggatttaacaatagtcattcagggaaaragataacgaattaaatctgtgggtgtataagaaaaaaaatacaggccaggtgcagtggctcacgcctgtaatcccagctctttgggaggctgaggtgggcggatcacttgaggccaggagttttgagaccagcctggccaacatggagaaacccagtctctactaaaaatacaaaaattagccaggcatggtggtgtgtgcctgtaatcctagctactcaggaggcggaggcacgagaattgcttgaacccaggaggcggaggttgcagttagccgaaatcacgccactgtactccagcctgggcgacagaggaagactgtctcaacaaaaaagaaaaaaaaatactgatgcaagatgaggtcttgctgtattgcccaggctggtctcaaactcctggcttcaagcgtcttcctgcctcagcctcccgaagttctgggattacaggtaggagtcaccgccccccactgaacagtttgttcttcactaactgttttcctggactgccttcacattcagcccctacagaggggtctttctggttctgggtcaggcaggcaacctgagtagctgccaggatccagccacatcctgctgagctgcatgaaggactgtggggctctctggggcctttgttccttgttacacttggagttgctggtctcccttaactggcttgtaggtcttagcccatctgggctgctgtaataaaataccttagactggaagccaggcacattgctcatgcctctaacctcagcatttaggaggctgagatgggaggattgcttgagcccaggagttcgagaccagcctgggcaacatagtgagacctcatctttacaaaaaaatttaattttaatttgtttttcacccgtgacacagccctcaggaggtcctgagaacatatgtctctcgtctttgcaaaaaattgttttaattagccgggcgtggtggcacacatccctagtcccagctactcaggaggctgaggtgagaggataacttgagcccaggagtttgacgctatagtgatccaagattgcaccactacgcttcagcctgggtgacagagcaagaccctgtctcaaaaaaacaaaacagactgggccattgataaacaacagagatgagctgctcatagttgtagagggtgggaagtcccatatcacggtgctagcagattccgtgtctagtgagggcccatctctcatagatagcaccttttaggtatctgcacagggtggcaaggacaaacaagctccccctcttttatacgggcacagttcgtattcatgaggacagagccctcctgactgaatcaactcccgaaggccccacttttttttttttttttggtgagacggagatttactcttgttgcccaggctggagtgcagtggtgcgatcttgactcaccgcatcctccgcctcccaggttcaagcgattctcctgcctcagcctcccaagtagctgggattacaggcatgtgtcagcatgccaggctaattttgtatttttagtagagacggggtttcactgtgttgcccaggctgatctcgaactcctgatctcaggtaatccgcctgtctctgcctcccaaagtgctgggattacaggcgtgagccactgcacccagccctttttaaatttttgatcaacaacttcttttttattttgagatggagtcttgctctgttgcccagcctagagtgcagtggcgtgatcttggctcgctgcaacttccacctcctaggttcaagcaattctgcctcagcctacctaatagctgggattacaggcgtgcaccactgcgcccagctaatttttgtatttttagtagagatggggtttcaccatattggccaggctagtctccaactcctgacctcaggtgatccgcccacctcggcctcccaaagtgctgagattacaggcgtgaaccaccatacctggctgaaaggcctaactttttttttttttttagacggagtcttgctctgtcaccaggctggagtgcattggcccgatctcggctcaccgcaaccttcgcctcctgagttcaagcgattctcctgcctcagcctcccgagtagctgggattacaggcacgtaccactgtgcctggctaattttttgtatttttagtagagatggggtttcaccatgttagccagkatggtctctatctcctgacctcgtgacctcgtgatccgccctcctcagcctcccaaagtgctggggttacaggcgtgagtcaccgtgcccagccagccccacttcttaataccactacattggagataggctttagcatgtgaattttgggaagaggcaaacattcagaccatagcatctgtcgacggccatgtcacagcttccctggaaagacatcaggaaaggactgtgcctttgacagtctctcacaggcccatgctggctggggaattcctcagctctcttccctaagagctgacagttactactcccaggaatcatcctgccagcccccttcctgcagatggcaggatccaccggcagtgtgagcaattcgtcaggtaacactgcggtctcaataggcccctgactgctggctacccaccttggcarctgtcaaaggaggtcgtctgtctgcccagccacagataatgcttctgagccctattcctgtttgagccacgttaatgtggaacaaaacagggagttaggttaggaggaatggaagtaattctttgttcattttttccacgaaggactgtgagcacccactgtgtacctggccaggtcctaggggtagaggacacaacagggatctacacaggcaaactccctgccccagggaaactgacatgaagccccaaaaaatgcccagtttggcaggggtggtggctcgcacctgtagtccgagcactttgggaggccaaggcaggaggaccacttgagcccaggagtttgagaccagcctgggcaacattagggagacctcgtctctattactaaaaaatgcacaaataaataatttttttttagaaaaagaaaaatggccagcttgctaaataaatcataggaactcccaagaaggataagtcaagcagggagaatcaagccagggagttagtgtcgggaagggctttgttggtcagacgcagtggctcatgcctataatcgcagggttttgtgaggctgtggcaggaggaacactcagctgggagttggagaccagcccaggcaatatagtgagatcacgtctctaccaaaaaaaaaaaaaaaaaagcatacatatacatatacttttttttttttttttttttttttttttcggttaactggatgggccgggtgccgtggctcacgcctgtaatcccagcactttgggaggtgggcggatcacttgaggtcaggagttcaagaccagcctggccaacatggtgaaaccccatctctactaaaaatagaaaaattagccaggcatggtggtggttacctttaatcccagctactcaggaggctgagacaggagaatcgcttgaacgattcttgcagtgagccgagatcccaccactgcactccagcctgggcgacagagcgagactctgcctcaaaaaaaaaaagaaaaaaaaaawtagctggatgtagctcctgtggtcccagctatttgggaagctgaggtgggaggattgcttgascccaggagtttgaggctgaagtgagctatgatggtgccactgtactccagcctgggtgacagagcaaggccctgtctccaaaagcaaaagagtagagaaagggctttatgtgaccagggagagtatgaagagctatggctgtcccattcccattctagtaggtccgagagcaagcagggccagactgccaggggccccaataaagcattgtaggggcccaggcagtgtcacttggggccaaggtagtacaaagtggttttgaaggagttgaagatgaatccaaggatctgaatgaggagggccagagctggtgaagctacggcattcacaggttttgggaaggactggagccaggtcctgaaattgttgagtggaggtgtctggggtgtgtgcgagtctggcattcacagggaagtccgggccaaagactccagtgggggaggcatcagtgaatagatggtgcttcaggcctgtcttagtcagctcaagctgccacacaacaaaatatcacagactgggtggcttaaacaacagacatttatatttcagagtgctggrggctggcagtctagatgagagtgccagcgtggtcaggttctggtgagggctctcttcatggcttgcagacagctgccttcttaataccaccgttatgacctcaattaaccttaattagctcccaaaggttttatctccagatacaggcacattggggctcagagtttcaatctgtgaatttggagggacatactttgtccatagcagagccctgagactgagcccagtcccctggaggtgaaaaccctttctggaagggccacactccccatccactactgcccttcctagatctcagctccagtgtcaccccttctgggcaaggtcaggcaccccagtgtgtagcacattgatctgtgtgaccaaggatgaatggccctgtctcctgctggactgtgagctccagaggcagggctactttgtcaccattgtggcctgcccaggcagggacctggcaaatatttattgagtagttgttgggaagtcatggaaaccgtgtgctgtgcccttgggtctcaccagaagatctgctcaggcccagggccaggactaggcactgtcctggccaggaaggtcccagctgccctgtggcctcctgcccttgtcccccacaccctcaggggtgctgatatgctgaattttaaggagagatgattctcatatggttttctgcccttggggagtttatagtcaagtgggacttagtttcctcagaggtaagcttaagggcactgtggccggggtggggcaggagagggacatcttctctagcctggagaagtgagtagctgagggtggaggaagagggtattccaggcagggtgcacagcttgggcaaaggcctcgctgcagtagaggaggaccaggcagtgtgtttgagcctgacttaggtggggatttggtggggactagaaccattaggtggtttagagacctcaatcctcgactccatcccacccctgcttcagccagcaggtgaccctgctagggacctgccagcgagagacccgtttcctctgagtccagtcatgctagctcccttcctggggctagcgtgggtgagggcttcttgcaggggcccacatagtttttctcctgagtccattgggcaggattgggccggattgggccaatcacagagggatggaggggttcccagagatgggtctgctctggcccacactgcagctcacccctgtccactctgtgcgggggccactggggaactagacgaacagcattcaggtcactgtggctcacagacccgtcgccccactccgctcgtccccagcagcatggagggagggagagctcccgtgcgctaattggctgagctatttggaccaattgctaatcaaaggctccaaagccctgggtgctgtggtgctgggctctgaagctgaggttcacaaggtatgggggacctcagtctgagcatcaggttggctctcattctcaggaggggacctgggccaccttcccaacccccacatctctgttgcctcctattatccccgtaacctttcagtctccattgccaaatgggggggttcaagaccagcctggacaacatagtgagaccctgtctttaaaaaaaaaaaaattacctgtggccggtgctgggtgcttggtaaggtcaccttgaagcagtcctgtgcccgttctgcactgttttgtttgtttgtttggttggctggttggttggttggttttggtggggtagtggggtcgggggatgtggttttttgtttttgctttttttgttttagagacagggtctcgctctatgacccaggctgaaatatagtggcacaatcatcactcactgcagcctctaactttttggctcaagtgatcctcccacctgagcctcccaagtagctgggactacaggtgcaagccaccaagccccactaattttaaaattttttgtagagataggggtctcactatgttgcccagactggtcttgaacccctggcttcaggggctcctcctgcttctgcctctcagagtgctgtgattacaggcgtgagccaccgtgcccagcctctctgcactgttctttaacacatttacaaatatttactgagcatctatttcattctaaagaactaatcttgaataaaaccagccagaatgtttgccttcattgagctgacagtgcccttggaggggttaactgtacatacacctcttttttcttttctttttttttttttttttgagatggagtatcactctgttgcccaggctggagtgtagtgactcgatctcagctcactgcaacctccacctcccaagttcaagtgattctcgtgcctcagcctcctgagtagctggaactacagatgtgcaccaccacacccggctaatttttgtatttttagtagagacggggtttcaccatgttggccaagctggtcttgacctcctgacctcaggtgatctgcccgcctcagcctcccaatgtgctgggattacaggcktgagccaccgcgcctggcctgtacatataactcttaaaatgctgccctgaccctggggctcactttcaaagatgtccacactctgtaggccaggaccccacctgtcccatacccttcctggcagccctgtccctgctacatcgcccttcagctacaccagctttctttgggtccctggaccacacctgataccttcccgcccagaagtgttatctctgtcctggcagttgctcaaccttttatggtccctaccaccaaggccatctgcttggttgacatacccaccccaactgtaattaaatcatccccggtgtctcctcactagacagctccacataagcacagctggtccttttagggctgtgtccccagcacctcccacaaaggaggatgcrgttcatcaggatgggttggatgaacagcccattttacagatgaataaactgaggcacaggcaggtgcaggattttggcagcactgcacacctgtcctggctttgtcctcctccctggggaatgagcttggagcacccctctaggaactgggatgccagcctcttcccttgaccatcttggtccttgtcatgtgggccccagtaccaggggtggctttaatttggctgcccagggaggtggttcagggctgccaggacccctgaagtaggctctctgggctctgtcctttgccccccaacatggtgcctgtttctyctgcctcttcatgcagagtggccagctcctggcccattcagctctgagtttgagctcctgggcggagatttttgttgccttgtaactgggattcctagatccagcctccaccctctgattgccctaaggaggttttggggttttgttttgttttgtttgtgttttcgtaggatggtggcagtgattttgaggaggggaagaggaaggaagatacaagcaagggaagtcacaggctgtggtgcctaggcagaccctggtttgaatcttggccttaccactttttgcatgtaagtggtaggggcagcagatagctcaggacatatcttgggtttttttgtttgtttttgttttgagacatagtctcactctgttgcccaggctagagtgcaatggcacaatcttgactcactgcaacctccaccctcccgggttcaagtgattctcctgcctcagcctcccgagtagctgggattacaggcaccggccaccacacccagctaatttttgtatttttaataaagatggagtttcaccgtgtttgccaggctggtctcgaactcccgacctcaggtgatccacctgactcggcctcccaaagtgctgggattggccaggtgtggtggctcatgcctgtaatcctacactttgggaggccaaggcaggtggatcatttgaggtcagtagttcaagaccagcctggcctatgtggtgaaaccgcatctctactacaagtacaaaaattagccggacatggtggcacacgcctgtaggcccagctactcaggaggctgagaatcacttgaccctgggaggcggaggttgcagtgagccgagatggcaccactgcactccagcctgggtaacagagcaagactctgtcttaaaaaaaaaaaaaaaaaaaaaagtgctgggattacaggcttgagtcatcccgcccttcaggacatatcttttgaattttgaacctggtgaatgaatttttagatgacctcaggacagtcctcaatttccacatgacctcagtttttccagctttgcaaggggagtatgaaaccagccctgaagtcttgctaagaggattcggggagctcatagaagttgtgagttggttcctccattcgcctgggtgttgtaaggggcagggcctgtgtcttgcttgtggcctgccagggtagcagctcagtaagtgagatggtatctcactgtggttaggattcacatttccctgatgactagtaatgtttccgtgtaatttcttgaatgatcattcagtaacaataagtgtaggttgagtttgtagaatcaggttgacctcctcagcctcgatttccaaatggagaaagcagagatttggagctcctggtcagaggagcaggtcggtgctggagccaggactcaaccttaggttgtacctctgagcctttgaacacttgccgtttctattcctcacagcagccctttcagacggaacgggtgttaccagattaggaggagagtggccactgtattctcagtgcccagcccagggaggcagatctgagtggagttgctaatgaaacatggaaggtgcttgagagctaactggaagggagggaaggtgtgcattcctgcaccagggcctttgcatgtacttgttactttctcctgctggccagctggagtgtctggaaagatctgccttactcagggaagccttctcactcgcactctgcccagttaggaccactgccctctagagaccctatagaattacagaggaggccgggcgtgatagctcacacctggaatcccagcactccagcctgggcgacagagtgagactccatctcaaaaaaaaaaaagaaaaaagaataaaccccacacacctttgccttccctttgctttccctcaccacacccccattctccccgcctcccagcccctggcaaccactaatctgcctcctgtctgcgtggatttgcctgtcctggacatttcctataaatggatcatacaatctgtggtccttttgtttggcctctttctgttggaataatcttttccagggacatccatgttgtagcatgtgtcagaatttcctttctttttatagctgaataatatcccattgtatggactgaccatgtttagttggcccatccatccgcagatggacgtttggattgtttccacctttgggctattgtgaataatgctgctgtgaacgtttgtttacaggttttcaatgcaggcaaatgttttcgtttttcctgggcataaattccaggagtggaatcgctgggtcatatggtaactctctttaaccgtttgaggaaccgtcagactgttctccatggtggctgtgccatttgacattcccacaagcagtggaaatgggttctggatttctcatcctcaccaacttttttgattccagccatcctagtgggtgtgagatggtgtctcattgtggttaggatttgcatttccctgatgatgttttcttctaatttccctgatgactagagatgttttcatgtaagttatttatttatttatttatttttgagacagtgtctctgtctgtatcccaggctggagtatagtggcgcaatcacagctcactgcagccttgacctgggctcaacaacagatccaccccccaccacaccctccctagtagctgggaccacaggtgtgctccaccatgccggggtaatttttgtatttttcgtaagaggcagggtttcaccatgctgcccaggctggtctcaatctcctaggctcaagtgatccacacgccttgccctcccaaagtgctgggattacaggcatgagccactgcacccagcctcatgcaatttctttttccttttttttttttgagacagtcttactctatgccccaggctgaagtgcagtgccacaatctcggctcactgcaacctctgtctcctgggttcaagtaattatctggcttcagcctccctagtagctgggactacatacccacaccaccttacctggctaatttttgtatttttggtagacagggttttgccacgttggccaagctggtctcgaactcctggcctcaagtgatccgcctgcctcagcctcccaaagtgctgagattacatgagtgagccactgcgcctgacctcatgtaatttcttgagtggtcatttagtcattatacaaacagtgattgaagggcatgtgcccagcactgcagactctgctgcacagtcagatgaccctgcctttctggcatttccatgccagtaccctgaagagataccatatatgtacctggtgcttgcaatagctggcactcagaggtagcacactgtgtcctagccactcttccgagcacttaagcatattcagttactcttcaagtacatatgaataagtatgcctttgccccctcctctttgcaagggatagcgtgtggccaccctggtctgcagctagcttagcagatttgaccacatattgtaaaagtgagtctgtaccaggacagatagggtagagggctctgtgtggtttagcaccatggtagattccrtcgtgcggatgtccctccagcaggggaggtctttggggccagggctaggccagcacccacatttgccrcctgaccccgtccctccgtctctgtctctccattcctccctgcccctcgtgcagccgctgccatggcccagacactgcagatggagatcccgaacttcggcaacagcatcctggagtgcctcaatgaacagcggctgcagggcctgtactgtgacgtgtcagtggtggtcaagggccatgccttcaaggcccaccgggccgtgcttgctgccagcagctcctacttccgggacctgttcaacaacagccgcagcgccgtggtggagctgccggcggctgtgcagccccagtctttccagcagatcctcagcttctgctacacgggccggctgagcatgaacgtgggcgaccagttcctgctcatgtacacggctggcttcctgcagatccaggagatcatggagaagggcaccgagttcttcctcaaggtgagctccccgagctgcgactcccagggcctgcatgcggaggaggccccatcgtcggagccccagagccccgtggcgcagacatcgggctggccagcctgtagcaccccgctgcccctcgtgtcgcgggtgaagacggagcagcaggagtcggactccgtgcagtgcatgcccgtggccaagcggctgtgggacagtggccagaaggaggctgggggcggcggcaatggcagccgcaagatggccaagttctccacgccggacctggctgccaaccggcctcaccagcccccgccaccccaacaggctccggtggtggcagcagcccagcccgccgtggctgcgggagcagggcagccagccggtggggtggcagcagcagggggtgtggtgagtgggcccagcacgtcggagcggaccagcccaggcacctcaagcgcctacaccagcgacagccctggctcctaccacaatgaggaggacgaggaggaggatggtggcgaggagggcatggatgagcagtaccggcagatctgcaacatgtacaccatgtacagcatgatgaacgtcggccagacaggtgaggtgccgtcctgtcccccatcccaccagccacccctgctcctcctgccactcgcgtgccactctctccctgcagccgagaaggtggaggccctcccggagcaggtagcccccgagtcccgaaatcgcatccgggttcggcaagacctggcgtctctcccggctgaacttatcaaccagattgggaaccgctgccaccccaagctctacgacgagggcgacccctctgagaagctggagctggtgacaggtgggccggtctcgccccagatctctcccctccgcagctttggagccggctggcctgggctgggctgggcagctggttaggagcccccagcacctcagtttccctatctgtgctgtagtgttggtaacagccaccctaagggtgggggcgttggtgagatggaggagctgatacagcaaggcctggcctctaggtttctggcttaaggggtcggggcgagcattggctattattgtttggccgcatgggtagattagctacttcccgggctcctgtgaaggccagctactacctaggttaggaatttggacagtcacaggggcgaatgcctgtagtcctagctactcaggaggctgaggtgggaggatcccttgagcccaggaggtcaaggctgcagtgagctgtggtggccactgcactccagcctgggtgacagagtgagacttcatctcttaaaaaaagaagaagaagactgtgtttggtccttgggtcagagtgcctaggtgtgagcctccactccctgttggtcctgctgagcttgggctcatctctagctggtgacagccagcgtgcccacctcacacaggcttgcggcacgactggccacacagcaggcaccccgaggatggtgaagcaaccctttctgtcctttcctgagcactgatgaggttgggggagccccaaggagcctcccctgactgcccttggtgggtagagatgtaggggagaaggtccctgggtgagttttcttgggacccagagcccagcagggagggcctggggtgttctgagatgaggcctggtatcatgggggctgtggcggtttgggggcaccccaggccatcctccggcttcctctcaccaggcaccaacgtgtacatcacaagggcgcagctgatgaactgccacgtcagcgcaggcacgcggcacaaggtcctactgcggcggctcctggcctccttctttgaccggtaaggcccttgccagagccccagggaggggggtggggtttccccatgtcccccccaccaccaacttgagcgctgactccctccatgtcccctgcccccaggaacacgctggccaacagctgcggcaccggcatccgctcttctaccaacgatccccgtcggaagcccctggacagccgcgtgctccacgctgtcaagtgtgagtgttggcccagctggacgaggcgtgggcccggggcacgcaggttgacgttttttcccagccttggctctcagagagggctagagttcagtgttgagaagcattctggggctcattctagccttgctgggaaaccggctgtgattgcttagagatttcttcgtgtttgggggatgcacgtgccgaagggaagccagggagcctgtgtcaggcaggagggtctcgaactcagggcagtctgggagggatgaggcagccagacagtgctagccactcgtcatggggggcatctagattttcaagtgaccactccccgttactaaattctggcaaatgatccgaatttttcaagaacacggggccatcccatcaaaaccaacacatccccacacatggctgaactcagtccggtgtagggttgggtgcacgtagtgtggtgtcctggccgcgtggcctcactcgtctcccctttgagagggagtcgcagatgctgtaggggagctggtgagtaggccttgtgggagtcacctggcccccgtgccaaggccgcacccaccctgccccacagactactgccagaacttcgcccccaacttcaaggagagcgagatgaatgccatcgcggccgacatgtgcaccaacgcccgccgcgtcgtgcgcaagagctggatgcccaaggtcaaggtgctcaaggctgaggatgacgcctacaccaccttcatcagtgaaacgggcaagatcgagccggacatgatgggtgtggagcatggcttcgagaccgccagccacgagggcgaggcgggtccctcggctgaagccctgcagtaacccgcccagcctcccgcggggccrcacacttcccctcccaacacacacacacacctgccatcttggtcatgagctactgtctgtccctccccaggacccgcggtgggtgctgcatgttcccggccctctgcccctcctgtcctaccccctttccccaccgagagctgggccgggagaggaccgcagggcaggtggcgtgaggtccgtgttgccttctttaacacacactcgtgcagtgggggagttctggctccccaacctaacccctagccgtcatctccacactcaccaggcccaccaggggagggggctggcctgggggtcttgggaaggcccctccccaggccctaggccacctcgcggaagccttcagcctccgcccctcactgcagccccttgggacttgaggggggccccaggggttctcaggacccctcccaccacctcccagtgcttccacgtctccaaaagcgccttcctgtcaccctcgtctatccctgcgcctgggggctggggtaggcgaggccgtggggactacccattttatagctggggaaacaggctccgagaaattgcacaaccgacctcaggtggccggcagtggcgtgcctggtgccctttctcctcttccgcctctgttgctccctttggtcctctggggcctcagagaggcaggtcctaaaggagggggggtctcctgggggcagaccgagggtctcggaggatagaatgagaggtttccagggctggcagagtgtgtgcgtgtgtgtgtgcagaagttttgctttcaaacaaatgaagatacaagaggcagtaggacctgggttggaacccaggggagcagactggggggctgttgcccctccctccatctccccacacccaccccaccccacagcagggctcctggcccccacccccctgtacataatttttaaaacctttttttagcgaatgaaatattgaagtataagattccttttatttttcaaaccaatggggctgtgtctattgtccccctcggtccccaggggtggggggccttggaaggcagggcggtgttggggggctggggggcaggctgaatgtgtgtgtgtgggtgtgtatgtgtggagtgtgagtgtgtgtttccatggtaggactccagtcccagctgctgcctaggctcctgtgggtcctgtgggtccccctcccctgttcaccttccccaacagggctatagtttaagggtgtcccaggccttggctggttggctgggcccagctcctgggggctgggcagggcagggcagggccgggtccacttccattgttagcagttgtttgcagaattttctcttttaccattcctctctttttgttctcgcccagagtgggtggttttttgttgttgttttagattttcatgtgaaggcagtttttttttcttttttaactccccatccccctatgcagggtgtcatttcaccatccacatccacatccttgtttgtgtttctggccctcgtcctccctgcctctcatctgcctccccaacccccacctacccactgctcccaggggtctctccaggggcagggggattttaggagatggggtgggggccagcccctactggacccttgtaatctgatttggagaccatccccccgatgggaccagcagccccgccggcccactgggggtccctcttaacatctgcttgttgcgggggtcagtcatgagtgccagggtctggctggggtcttggcactgtcttcctggccggggcctgaaaccttagcccccagccggcctgagtgggggatattgacacccccagctaaagcacaagcaccttagtcacccctcctctccccccgcctcctggcctgccaccccaccccagcgtttaccccaaagcacaatgccctggtcacttggcaagcggctgggcctgacagaggccgaggggcagaccggggctccagccagacccctgaaaggaagcaggtgctcccccacttccaggccttagttggggtgggggggccagctcctgggcctggggtcttctcacccccacccccttgtcctgggtaggcccctgcctgcccctctctgccttttcctcgggtgtccctcctcgagcccctgtggcattggcttgggtggcagagcccacttgtttcagggaccccaggaggtgccccctggctcccaggactgtgtgtgggtccggggggtgggggggtggggagaagggtcgggcagggggtgcaggggaggaaactcctcaccaggagagccaaagacagggttgtgccttaccccaggagccacccctgtaccccccttgccctgccattcaccctccacccctacccctgggcggcctgctgctttttccttctcttcctcccctgccctgagctgcatggttcccccaccctgggcagccaggaaggaatctgaatggagaatcaccaaccaccagagaaaaaagactgtggggccctcccctgccaactccccttccctggccgcccactcaacccacacctctttcacgcaggacaggctgcccaccctgtccacgtgaagtgccaacgccctccccaccctgggccgagcccccacccctccctgggcccccaagtgagattgcacatttaactactgtaaggagaggagcggcgttggcaaatgtgaaccatgagaatatcagtgatactgatgagaataaactaaacgcctttgtaacagccttgccgcatgctcgttactggggggcccagggaggaacacacacctgcattgtgcccagcagacccaggttgctgactgcaaactgacagcctccgattctaacacgcatgcaagttaccccaacagatacagataacgcaacatatgagctggtcctacacacacacacacacacacaatttttttttctttttttttttttgagatggaatttcactctgtcgcccaggctagagtggcgcgatctcggctcactgcaacctctgcttcctgggttcaagccattctgccttagcccccccaaatagtggggattgcaggcacccaccaccatgcccggctaatttttgtatttttagtagagacagggtttcaccatgttggtcaggctgggctcgaactcctgacctcaggtgatccacccgccttggcctccccaagtgctgggattacaggtgtgagccaccgcgcccagcattttcttttcttttttttttttgagtcggagtttcgctcttgttgccaggctgtagtgtcatggcgcgatctcggctcactgcaaccaccgcctcccaggttcaaatgattgtcctgcctcagcctcctgtgtagctgggattacaggcatgcaccaccaggttcagctaattttatatttttagtagagatggggtttctccatgttggtcaggctggtctcccaaagtgctgggattacaggcatgagccaccaccacacccagcctgaaaaaatacttttaattagctgggtgtggtggcatgcacctgtactcccagctactctggaggctgaggcaggagaatcacttcaactgggaaggtcaaggctgcagtgagctatgatggcaccactgcactccagcatgggcaagagtcagatcccatctcaataaaaaaaaaaaagggagctgtggctctgtcaattttacagcaacactggctcactcggtgcccgcctgtgccgtggctgatatgccaagccccagaaacacatcccatacacacacactccacgccgcattcagaagagcattcatgcattaaaagaacataaaagagatcggcagggcgcagtggctcatgcctgtaatcccagcacttcgggaggctgaggcagatggatcacctgaggtcaggagttcgagaccagcctggtcaacatggcaaaaccccgtctttactaaaaatagaaaagttagctgggcgtggtggagtgcgcctgtaatctcagctacccaggaggctgaggcaggagaattgcttgaacctggaaggcggaggttgcagtgagccaagatcgcaccattgcactccagcctaggtgacgagcaaaacttagtctcaaaaaaaaaaaaaaaaaacgagatcacaaaatttaaccgatattggaaatatctgggtgaacaagagggtcccaagaatatgaaaggacaaatggttctatcaagtaggaaaaaccatggatgcaccgtgggtccccatagactcaaagataacacaagattaaagtaactgggctgggcacggtggctcatgcctgtaatcccagcattttgggaggccgaggcaggtggatcacctgagatcaggagttcaagaccagcctggccaacatggcaaaaccacgtctctattaaaaatacaaaaattatctgggtgtggtggcgggtgcctgtaatcccagctactcaggaggctgagacaggaaaatcacttgaatgcgggaggtggaggttgcagtgagacgagattgcgtcactgcactccagcctgggtgatagagcaagactctatctcaaaataaataaataataacatagaagccagtcatgatggctcacacctgtaattccattactttggaaggctgagagaggaggatcagtggagcccaggagtttgagaccagcctgggcaatatagggagaccctgtctctacaaaaatgaaatagccaggcgaggtggcatgtgcctgtggtcccagctacttgggagactgaggtggaaggctgccttgagcccaggagttccaggctgcagtgagccatcattatgccactgcactccaacctgggagacagagtgagagagaccctgtctcaaacaaacaaacccaaaataggccaggcacagtgactcatgcctgtaatcccagcactttgggaggctgaaataggcggatcatttgaggtcaggagttcaaattcaagaccagcccggccaacatggcaaaaccacatctctactacaaataaaaaattagttgggtgtggtggagcattcctgtaatcacagctattcaggaggctgaggcatgagaaccgcttcaacccaggaagcagaggttgcagtgagccgagatcacgccattgcactccagcctgggcgacagagcgagactctgtctcaaaaaaatataaataaaaataaaaagatcaagagaacctaaaccattaaaaaaaagactcgcatgggtgcggtggctcccgcctgtaatcccagcactttgggaggctgaggcaggcaaatcacttgaggtcaggagtttgagaccaacctggccaacatgaggaatcccatctgtactaaaaatacaaaaattagctgggtgtggtgacacacacctgtaatcccagctacttgggaggctgaggcagaattgctggaaaccaggaggtggaggttgcagtgagcagagattgcaccactgtactccagcctgggtgacaagagtgaaactctgtctcaaaaaaaaaaaaagaaatccggaacacgcacatgtgcacacacacactggagcacttgtgcaagcagtggcttagaatgggagtcccaatcagggctcggtcacgcatttgcagtcaacacacaccacacgacacaaatacatataaaaaaggctgacattttatttccaggttggcacgtgtataaggcacaggggcaaatggctttggggtcctggaactggaaatggagacaggtgtgtctcaggtgtccctgcctccaccaccccctaagtgcacttgagacaggaccagtggtggtggttccagcccagggtcctgaagggtcccactggctctaggggagagccatggggacagctccccaggcgggaccctctactctccagctacccaggagggaccctctcctcctagggggcgaggccagctccaaagtgcttggtggctccccaggcttaagggaccagcctgccagggagggctggggtcagagagagaatagtaagatgagaacgaggagaagcacccccactagcacggcgatggcacaccactgtcggcggtctgggaacgagaaggtcaggggtcacggggagagggtaccacctacaacctgcccccaccaggactgacccctcccctgaggggactcaccactcgtcatgtgggatactttggccaacttcctgaggaccccgtccatgcgggactgggtgtggtccatctcttgggcgaaggcatccagcatgctgccaagaacaggatggcatcagccccagatggcccagacacaccagggcggccgagagcccctggcccacccccagggtcctggcctcacatgccctgctcgtccagctcttctccaacgcggccggacatgtgcttcagaacctggatgctcccagacaccatctccagctgttgatcctgttcatccatgatcagctgcagagcgaaggggtgggagatgctgttgaaaacgaccccagaaggccaggcgctatggcttatgactgtaatcccagcactctgggaggccgagacaggcggatcacttgaggccaggagttcgagaccagcctggccaacatggtgaaaccccatctctactaaaaatataaaaattggccaggcattgtggtgggcgcctgtaatcccagctactagggaggctgaggcaggagaatcactggaacctgggaggcggaggttgcagtgagctgagatcgcgccactgcactccagcctgggcgacaaagcgaaactccatatcaacaacaacaacaacaaaaagggaccccagacctcagatcagtctgcaaggctctcccctcccaagatccaccccgctggccccaaaacctgctgtgtggcctgctgctcctcgatgtagcgagatgtggccgagactgcgctggcatccagcaggtcgctgggtgacttctgggcagctggcttgcctgcgagtatctgcaggggcacacaacataggctcagggagagaccccaactcacagcggggcctgtggggcaaatccccacggtggtaagtcaggggggcagactctggggcaggacagcctgcattccccactcaccacttactagcaaggtgacccagagaccccatcatttggcttccttgtgcctcagtttcctcatctgtaaaatgcagagagcaggatggggcatggtagctcatgcttgtaatcccagcactctgggaggtggaggtgggcagataacttgaggtcaggagctcgagaccagcctggccaacatggtgaaaccccatctctactaaaaatacaaaaattgggccgggcacagtggctcacacctgtaatcccagcactttgggaggccgaggtagatggatcacgaggtcaagagtttgagagcagcctggccaacatggtgaaatcccgtctctactaaaaatacaaaaattagccaggcttggtggcgggtgcctgtaatcccagctactagggaggctgaggcaggtcagaatcacttgaacctgggaggctgaggttgcagtgagccgagatcacaccactgcactccagcctgggtgacaggttaagaccttctctcaaaaaaaaaaaaaaaaaaaaaaattaccgggtgtggcagtgcatgcctgtaatcccagctacttgtgaggctaaggcagcagaatcgcttgaacctggggggcggtggttgcagtgagctgagatcgcaccactgcatttccagcctgggtgtcagagtgaccttgcctcaaaaaaaaaaaaaataaaataaaatgggaagagctagaatccgtgtttcctgggttgaaatgaggatttaaagaattaattgatgggggacacttacagcagtgcccaacacatagtaatgctagtaaatgtcacattttactatttgtttatttttggggggattttagctgggattacaggcacctgccaccacatccagctaatttttgtatttttactagtgatagggtttccccatgttggccaggctggtctcgaactcctgacctcaagtgatccacctgcctcagcctcccaaagtgctgggattacaggcgtgagctaccatgcctggcccaacagatgtttgtttgtttgtctgagacagagtcttgctctgtcacctaggctggagtgcagtggtgtgatctcgcctcactgcaacctccacctcccgggttcaagcaattctcctgcctcagcttcccaagtatctgagattacaggtgatcaccaccacgcctggctaatttttgtattttttgtagagacagggtttcatcatgttggccaggctggtctcgaactcctgacctcaggtgatccacttgcctgggcctcccaaagtgctgagattttaggtgtgagccaccgtgcccggctccaacagatgtattttagagtttggacttgaattcccccaaggcagcacatctggaaggcacgtgggcactgctatgggatgacaaactgggaggagcctcagtcccccaccctccccgaccccacgtacgcttatgagggagagagaaaggctggtggttctcaacatatgaaaaatatcaacagagaacaccaagagaaaaagtggactgacagaggtggttgggagaaacacagaaacacacacacacacacacacacacacacacacacggcaggcacattacagaggaaactagcaga

SEQ ID NO: 96792 - DNA, 32765 bp, Homo sapiens
  misc_feature (1)...(32765): n = A,T,C or G
nnnnnnnnnnnnnnnnnnnnnnnnnnnnnnnnnnnnnnnnnnnnnnnnnnnnnnnnnnnnnnnnnnnnnnnnnnnnnnnnnnnnnnnnnnnnnnnnnnnnnnnnnnnnnnnnnnnnnnnnnnnnnnnnnnnnnnnnnnnnnnnnnnnnnnnnnnnnnnnnnnnnnnnnnnnnnnnnnnnnnnnnnnnnnnnnnnnnnnnnnnnnnnnnnnnnnnnnnnnnnnnnnnnnnnnnnnnnnnnnnnnnnnnnnnnnnnnnnnnnnnnnnnnnnnnnnnnnnnnnnnnnnnnnnnnnnnnnnnnnnnnnnnnnnnnnnnnnnnnnnnnnnnnnnnnnnnnnnnnnnnnnnnnnnnnnnnnnnnnnnnnnnnnnnnnnnnnnnnnnnnnnnnnnnnnnnnnnnnnnnnnnnnnnnnnnnnnnnnnnnnnnnnnnnnnnnnnnnnnnnnnnnnnnnnnnnnnnnnnnnnnnnnnnnnnnnnnnnnnnnnnnnnnnnnnnnnnnnnnnnnnnnnnnnnnnnnnnnnnnnnnnnnnnnnnnnnnnnnnnnnnnnnnnnnnnnnnnnnnnnnnnnnnnnnnnnnnnnnnnnnnnnnnnnnnnnnnnnnnnnnnnnnnnnnnnnnnnnnnnnnnnnnnnnnnnnnnnnnnnnnnnnnnnnnnnnnnnnnnnnnnnnnnnnnnnnnnnnnnnnnnnnnnnnnnnnnnnnnnnnnnnnnnnnnnnnnnnnnnnnnnnnnnnnnnnnnnnnnnnnnnnnnnnnnnnnnnnnnnnnnnnnnnnnnnnnnnnnnnnnnnnnnnnnnnnnnnnnnnnnnnnnnnnnnnnnnnnnnnnnnnnnnnnnnnnnnnnnnnnnnnnnnnnnnnnnnnnnnnnnnnnnnnnnnnnnnnnnnnnnnnnnnnnnnnnnnnnnnnnnnnnnnnnnnnnnnnnnnnnnnnnnnnnnnnnnnnnnnnnnnnnnnnnnnnnnnnnnnnnnnnnnnnnnnnnnnnnnnnnnnnnnnnnnnnnnnnnnnnnnnnnnnnnnnnnnnnnnnnnnnnnnnnnnnnnnnnnnnnnnnnnnnnnnnnnnnnnnnnnnnnnnnnnnnnnnnnnnnnnnnnnnnnnnnnnnnnnnnnnnnnnnnnnnnnnnnnnnnnnnnnnnnnnnnnnnnnnnnnnnnnnnnnnnnnnnnnnnnnnnnnnnnnnnnnnnnnnnnnnnnnnnnnnnnnnnnnnnnnnnnnnnnnnnnnnnnnnnnnnnnnnnnnnnnnnnnnnnnnnnnnnnnnnnnnnnnnnnnnnnnnnnnnnnnnnnnnnnnnnnnnnnnnnnnnnnnnnnnnnnnnnnnnnnnnnnnnnnnnnnnnnnnnnnnnnnnnnnnnnnnnnnnnnnnnnnnnnnnnnnnnnnnnnnnnnnnnnnnnnnnnnnnnnnnnnnnnnnnnnnnnnnnnnnnnnnnnnnnnnnnnnnnnnnnnnnnnnnnnnnnnnnnnnnnnnnnnnnnnnnnnnnnnnnnnnnnnnnnnnnnnnnnnnnnnnnnnnnnnnnnnnnnnnnnnnnnnnnnnnnnnnnnnnnnnnnnnnnnnnnnnnnnnnnnnnnnnnnnnnnnnnnnnnnnnnnnnnnnnnnnnnnnnnnnnnnnnnnnnnnnnnnnnnnnnnnnnnnnnnnnnnnnnnnnnnnnnnnnnnnnnnnnnnnnnnnnnnnnnnnnnnnnnnnnnnnnnnnnnnnnnnnnnnnnnnnnnnnnnnnnnnnnnnnnnnnnnnnnnnnnnnnnnnnnnnnnnnnnnnnnnnnnnnnnnnnnnnnnnnnnnnnnnnnnnnnnnnnnnnnnnnnnnnnnnnnnnnnnnnnnnnnnnnnnnnnnnnnnnnnnnnnnnnnnnnnnnnnnnnnnnnnnnnnnnnnnnnnnnnnnnnnnnnnnnnnnnnnnnnnnnnnnnnnnnnnnnnnnnnnnnnnnnnnnnnnnnnnnnnnnnnnnnnnnnnnnnnnnnnnnnnnnnnnnnnnnnnnnnnnnnnnnnnnnnnnnnnnnnnnnnnnnnnnnnnnnnnnnnnnnnnnnnnnnnnnnnnnnnnnnnnnnnnnnnnnnnnnnnnnnnnnnnnnnnnnnnnnnnnnnnnnnnnnnnnnnnnnnnnnnnnnnnnnnnnnnnnnnnnnnnnnnnnnnnnnnnnnnnnnnnnnnnnnnnnnnnnnnnnnnnnnnnnnnnnnnnnnnnnnnnnnnnnnnnnnnnnnnnnnnnnnnnnnnnnnnnnnnnnnnnnnnnnnnnnnnnnnnnnnnnnnnnnnnnnnnnnnnnnnnnnnnnnnnnnnnnnnnnnnnnnnnnnnnnnnnnnnnnnnnnnnnnnnnnnnnnnnnnnnnnnnnnnnnnnnnnnnnnnnnnnnnnnnnnnnnnnnnnnnnnnnnnnnnnnnnnnnnnnnnnnnnnnnnnnnnnnnnnnnnnnnnnnnnnnnnnnnnnnnnnnnnnnnnnnnnnnnnnnnnnnnnnnnnnnnnnnnnnnnnnnnnnnnnnnnnnnnnnnnnnnnnnnnnnnnnnnnnnnnnnnnnnnnnnnnnnnnnnnnnnnnnnnnnnnnnnnnnnnnnnnnnnnnnnnnnnnnnnnnnnnnnnnnnnnnnnnnnnnnnnnnnnnnnnnnnnnnnnnnnnnnnnnnnnnnnnnnnnnnnnnnnnnnnnnnnnnnnnnnnnnnnnnnnnnnnnnnnnnnnnnnnnnnnnnnnnnnnnnnnnnnnnnnnnnnnnnnnnnnnnnnnnnnnnnnnnnnnnnnnnnnnnnnnnnnnnnnnnnnnnnnnnnnnnnnnnnnnnnnnnnnnnnnnnnnnnnnnnnnnnnnnnnnnnnnnnnnnnnnnnnnnnnnnnnnnnnnnnnnnnnnnnnnnnnnnnnnnnnnnnnnnnnnnnnnnnnnnnnnnnnnnnnnnnnnnnnnnnnnnnnnnnnnnnnnnnnnnnnnnnnnnnnnnnnnnnnnnnnnnnnnnnnnnnnnnnnnnnnnnnnnnnnnnnnnnnnnnnnnnnnnnnnnnnnnnnnnnnnnnnnnnnnnnnnnnnnnnnnnnnnnnnnnnnnnnnnnnnnnnnnnnnnnnnnnnnnnnnnnnnnnnnnnnnnnnnnnnnnnnnnnnnnnnnnnnnnnnnnnnnnnnnnnnnnnnnnnnnnnnnnnnnnnnnnnnnnnnnnnnnnnnnnnnnnnnnnnnnnnnnnnnnnnnnnnnnnnnnnnnnnnnnnnnnnnnnnnnnnnnnnnnnnnnnnnnnnnnnnnnnnnnnnnnnnnnnnnnnnnnnnnnnnnnnnnnnnnnnnnnnnnnnnnnnnnnnnnnnnnnnnnnnnnnnnnnnnnnnnnnnnnnnnnnnnnnnnnnnnnnnnnnnnnnnnnnnnnnnnnnnnnnnnnnnnnnnnnnnnnnnnnnnnnnnnnnnnnnnnnnnnnnnnnnnnnnnnnnnnnnnnnnnnnnnnnnnnnnnnnnnnnnnnnnnnnnnnnnnnnnnnnnnnnnnnnnnnnnnnnnnnnnnnnnnnnnnnnnnnnnnnnnnnnnnnnnnnnnnnnnnnnnnnnnnnnnnnnnnnnnnnnnnnnnnnnnnnnnnnnnnnnnnnnnnnnnnnnnnnnnnnnnnnnnnnnnnnnnnnnnnnnnnnnnnnnnnnnnnnnnnnnnnnnnnnnnnnnnnnnnnnnnnnnnnnnnnnnnnnnnnnnnnnnnnnnnnnnnnnnnnnnnnnnnnnnnnnnnnnnnnnnnnnnnnnnnnnnnnnnnnnnnnnnnnnnnnnnnnnnnnnnnnnnnnnnnnnnnnnnnnnnnnnnnnnnnnnnnnnnnnnnnnnnnnnnnnnnnnnnnnnnnnnnnnnnnnnnnnnnnnnnnnnnnnnnnnnnnnnnnnnnnnnnnnnnnnnnnnnnnnnnnnnnnnnnnnnnnnnnnnnnnnnnnnnnnnnnnnnnnnnnnnnnnnnnnnnnnnnnnnnnnnnnnnnnnnnnnnnnnnnnnnnnnnnnnnnnnnnnnnnnnnnnnnnnnnnnnnnnnnnnnnnnnnnnnnnnnnnnnnnnnnnnnnnnnnnnnnnnnnnnnnnnnnnnnnnnnnnnnnnnnnnnnnnnnnnnnnnnnnnnnnnnnnnnnnnnnnnnnnnnnnnnnnnnnnnnnnnnnnnnnnnnnnnnnnnnnnnnnnnnnnnnnnnnnnnnnnnnnnnnnnnnnnnnnnnnnnnnnnnnnnnnnnnnnnnnnnnnnnnnnnnnnnnnnnnnnnnnnnnnnnnnnnnnnnnnnnnnnnnnnnnnnnnnnnnnnnnnnnnnnnnnnnnnnnnnnnnnnnnnnnnnnnnnnnnnnnnnnnnnnnnnnnnnnnnnnnnnnnnnnnnnnnnnnnnnnnnnnnnnnnnnnnnnnnnnnnnnnnnnnnnnnnnnnnnnnnnnnnnnnnnnnnnnnnnnnnnnnnnnnnnnnnnnnnnnnnnnnnnnnnnnnnnnnnnnnnnnnnnnnnnnnnnnnnnnnnnnnnnnnnnnnnnnnnnnnnnnnnnnnnnnnnnnnnnnnnnnnnnnnnnnnnnnnnnnnnnnnnnnnnnnnnnnnnnnnnnnnnnnnnnnnnnnnnnnnnnnnnnnnnnnnnnnnnnnnnnnnnnnnnnnnnnnnnnnnnnnnnnnnnnnnnnnnnnnnnnnnnnnnnnnnnnnnnnnnnnnnnnnnnnnnnnnnnnnnnnnnnnnnnnnnnnnnnnnnnnnnnnnnnnnnnnnnnnnnnnnnnnnnnnnnnnnnnnnnnnnnnnnnnnnnnnnnnnnnnnnnnnnnnnnnnnnnnnnnnnnnnnnnnnnnnnnnnnnnnnnnnnnnnnnnnnnnnnnnnnnnnnnnnnnnnnnnnnnnnnnnnnnnnnnnnnnnnnnnnnnnnnnnnnnnnnnnnnnnnnnnnnnnnnnnnnnnnnnnnnnnnnnnnnnnnnnnnnnnnnnnnnnnnnnnnnnnnnnnnnnnnnnnnnnnnnnnnnnnnnnnnnnnnnnnnnnnnnnnnnnnnnnnnnnnnnnnnnnnnnnnnnnnnnnnnnnnnnnnnnnnnnnnnnnnnnnnnnnnnnnnnnnnnnnnnnnnnnnnnnnnnnnnnnnnnnnnnnnnnnnnnnnnnnnnnnnnnnnnnnnnnnnnnnnnnnnnnnnnnnnnnnnnnnnnnnnnnnnnnnnnnnnnnnnnnnnnnnnnnnnnnnnnnnnnnnnnnnnnnnnnnnnnnnnnnnnnnnnnnnnnnnnnnnnnnnnnnnnnnnnnnnnnnnnnnnnnnnnnnnnnnnnnnnnnnnnnnnnnnnnnnnnnnnnnnnnnnnnnnnnnnnnnnnnnnnnnnnnnnnnnnnnnnnnnnnnnnnnnnnnnnnnnnnnnnnnnnnnnnnnnnnnnnnnnnnnnnnnnnnnnnnnnnnnnnnnnnnnnnnnnnnnnnnnnnnnnnnnnnnnnnnnnnnnnnnnnnnnnnnnnnnnnnnnnnnnnnnnnnnnnnnnnnnnnnnnnnnnnnnnnnnnnnnnnnnnnnnnnnnnnnnnnnnnnnnnnnnnnnnnnnnnnnnnnnnnnnnnnnnnnnnnnnnnnnnnnnnnnnnnnnnnnnnnnnnnnnnnnnnnnnnnnnnnnnnnnnnnnnnnnnnnnnnnnnnnnnnnnnnnnnnnnnnnnnnnnnnnnnnnnnnnnnnnnnnnnnnnnnnnnnnnnnnnnnnnnnnnnnnnnnnnnnnnnnnnnnnnnnnnnnnnnnnnnnnnnnnnnnnnnnnnnnnnnnnnnnnnnnnnnnnnnnnnnnnnnnnnnnnnnnnnnnnnnnnnnnnnnnnnnnnnnnnnnnnnnnnnnnnnnnnnnnnnnnnnnnnnnnnnnnnnnnnnnnnnnnnnnnnnnnnnnnnnnnnnnnnnnnnnnnnnnnnnnnnnnnnnnnnnnnnnnnnnnnnnnnnnnnnnnnnnnnnnnnnnnnnnnnnnnnnnnnnnnnnnnnnnnnnnnnnnnnnnnnnnnnnnnnnnnnnnnnnnnnnnnnnnnnnnnnnnnnnnnnnnnnnnnnnnnnnnnnnnnnnnnnnnnnnnnnnnnnnnnnnnnnnnnnnnnnnnnnnnnnnnnnnnnnnnnnnnnnnnnnnnnnnnnnnnnnnnnnnnnnnnnnnnnnnnnnnnnnnnnnnnnnnnnnnncaccgggagaggcagggctggtccagcgtctagggagaccaggtcccaccctgcccacaggagccagaccctgctgtgctctacaggcctgcgtggagcttccttcctgggacatcaccctcctctgccccaggctctgagctgccaggagcagctctgcacttggtctccaaactgtccaccgccccaggggtccctcacctccacctgtcatttcccagccagagcgtgggcctccactctctgagttggtctgtcccagaggctcctatactcagacctctgaggtccatcccaagggctctcacactcggccctctgaggttccagtgtcgctgagacacatccccctccttccgtggctgcaggacctcgagccaacagggtccagatcctctggttccacaccgtgccttccayggtgtcctcccagcttgatcagaggcccccccaaggaacctactgccccctccctacctggatcccaggtggcctgtgtgcgtggtcttcaccgcccacccacctccccttcccgtggccaagcatggaggctagcagacagggaggccctggccttgtcagcccacagctctgaccctggccctggaccacccctggcctcccgggacctcactgcctcatcagctgcctctctgggccacgctatgcgagcaaatgtacccagcctcttgcccccgagaccctccctagcgccctgctgttgagacacccttgcttcctgaatcccaaaagactctcttccctgctccgtttggtgaacttcctccttcccgagaaaagggttctggagagaacattcttgtgacttttccctcactcgactggcatgcggctgggtctgtcctgggcttggcaccaccactgaaaagccagggccccacttgctgcccttggggtgtgtagggcactctgtccccagaggctaaacccacagtgacatgccccgggggtagccctttcattctcagcagggcccttcctgggcatggggctctctggccgcagaccccgctctagacatcattactttcctggataacttcctctccaccattgtcttctcattctgaggccactggaattatcttcgaattttggtatctgcttccttccattttctatcttgctttttgtcatactttctagaaggatttctcatctttttttgagatggagtctcactctgtagcccaggctggagtgcaatggcgcgacctcagctcaccgcaacctccgcctcccaggttcaagtgattctcctgcctcagcctcccaagtagctgggattacaggtgcgtgccaccatgcccggctaatttttgtatttttagtagagacagggtttcaccatgttggccaagctggtctcgaactcctaacctcaagtgacccacccacctcggcctcccaaagtgttggtattacaggcgtgagccgtcgtgcccggccttttttgttgttgagacagggtctcattctgtcatccaagctggaatgcagtcttgaaatcacagctcactgcagccttgaccttctgggctcaagcgatcctccaacctcagcctcccaagtagtggggattacaggtgtgtgtcaccacgcccagctaatttattattattttgtttgtagagactgggtttcgtcatgttgcccaggctggtctcaaactcctgggctcaagcgatcctcccacaccttggcttctcaaagcgctgggattccaggcttgagccactgtgcccagcgtcttctaatcttttaaagttttttcatgtccatttaaagaactatttctggccaggtgtggtggctcacacctgcaaacctagcactttgggaggatgaggcaggcagactgcttgagcccagaagcttgagaccccatctctacaaaaaatacaaaaaaaaaaaaaaattagttgcatgtggtggtgcgcacctgcagtccctgctacccaggaggctgaggtgggaggatcacctgagtctggaaggtcagggggcagtgagccgttgatggctgccactgcactccagcctgggcaacagagcgagagctctgtctccagaaagaaaaagaaaaagagaaagagaaaaaactgtttcctgttcctgagtctccagctttgccccgtgggggtaacatccttggctgcttcagcctgtgcccgtctctgcctgttatgcgggtctttcctcgggtggggtgtggttctttactggtgcatgttttcacccaggctggagtgcagtggtnnnnnnnnnnnnnnnnnnnnnnnnnnnnnnnnnnnnnnnnnnnnnnnnnnnnnnnnnnnnnnnnnnnnnnnnnnnnnnnnnnnnnnnnnnnnnnnnnnnnnnnnnnnnnnnnnnnnnnnnnnnnnnnnnnnnnnnnnnnnnnnnnnnnnnnnttcaagtgattctccctgcctcagcctcctgagtagctgagattacaggcatgcaccaatacacccagctaattttttgtatttttagtagagatggggtttcgtcatgttggccaggctggtctcaaactcctgacctcaggtgatccacccgcctcggcctcccaaagtgttgggattacaggcttgggccagcgcgcccagcgccccatgggtttcttcaccagacaggcagggacctggtcacttggcctttcactgtggttcctctgttttctcctgtctgctgctgggggcacctgcctcacctacagcatcctcagcaaggagccagggtcttcctgtttcgctgtggatggagagccagggtcctctggtttagctatggatagccactaagactcgcccctgcctctgaggccatgggccctgggtccacagcctcttcaaggagctcccagttcccgctgtgggcattagctgccccctccaactcctggtcttctctgtgggtgcccacacttgggactcttcgtttcctcgttgacctgaatcccggcattagcaccagcttcctgccactggctgactgaatgcccagcccagcctcagtccctctcctctcccatgctctggggcttccctatcccaccattcccctcccgtgcctgtgctccactctgaaaccccttctcttccatcccactctatctgagacccctcgacctatgttcagctctcccccaagccgctgcacatcccctgccatacctactcagtcttcagcctctttctcctgtctctcccctgccagcaattaaacatgccaagttttggccgggtgtggtggctcacgcctgtaatcccaccacttgggaggctgaggnnnnnnnnnnnnnnnnnnnnnnnnnnnnnnnnnnnnnnnnnnnnnnnnnnnnnnnnnnnnnnnnnnnncaaaacaaaccaacaacaacaacaacaaacaacaacaaaaaaaacatgtcaagtttctcccgtctttttttttttgagtcagggtcttgctctgtcgcccaggctggagtgtagtggtgtgatcacagctcactgcagctttaacctcccaagttcaagagctcctcccgcctcagcctctggagtaactgtgatcacaggcatgagccactgcaccagttcactttgaattttctgtctcatgatgctgcccagtctggtcttgaactcctgggctcaagcgatcctcccacctcggcctcccaaattgctgggattacaggcatgagccactgtgcccggcaaacgtctctcataaaaaactccttctttttaactctttagccttttcacagccagatgtggttttttttttgtttgttttgttttttgtcttttttttgtttttgagacggagtctcgctytgtcgcccaggctggagtgcagtggcgcgatctcggctcactgcaagttccgcctcccgggttcacgccattctcctgcctcagcctcccgagtagctgggactacaggtgcccgccaccacatccrgctagttttttgtatttttagtagagacgaggtttcacaccgtgttagccaggatggtctcgatctcctgacctcgtgatctgcctgcctcggcctcccaaagtgctaggattacaggtgtgagccacagtgcccggctctttttctttttttttttttttttgacagagtctagctctgtcaccagtctggagtgcagtggcgcaatctcagctcactgcaacttccgactccctggtctaagtgattctcctgcctcagcctcccgagtagctgggattacaggcacgcaccactgcgccgtgcccagctaattgttgtaattttagtagagacgggtttcaccatgttggccaggctggtctcgaactcctgacctcgtgattcgcccgcctcggcctcccaaagtgctgagattacaggcgtgagccaccgcagccggcccgcactcaagacattcttaaaagatgctctccactcactctctcagttgctgatctcctgtaatctggcttctctccccatgagccactgaagctgctcttcctggtatcaccaacaatccctttgccaagaaatcccatggatccctctcaggctttatctgatttgacttctgtgcagctttacatgccagagcccttcctggaacacccactcccccagtcctctccttggggtgctgcaccctctcttctagctgcttggtcactytcctgccctcctgggctctaacgttctgggcagcctgtcctgtggggagagaggagcttcctcttctcacacttctgtattgtggctacctcaacacctacctccgccccaggatcttccttggagcgctagtcctactgcacttctccacttcaatgtctccaggttcccttcctgcacagccccctactcccaccgtgttctctgatttctgtggatggaaccaccatccatcttggttccagagcccacatccctgtctcgattctgcttgacctattgggtccgttccatgtcccggggactctctcttcctgacaccactgcaatgtgtccacttctatcttctgccaccacytyagctcagatcggtagcatctgctgcctgtcctgtgcatctcatggcattattcctgctgtcctgcagaccagtgcggttttgctagcttaggaacatgactgtgtcacccctacagttccgacaacccttcatttcaagcccatctgccttgctgtggttactcaggctctttggactgggcctggcttcctgcctctcttctcctcccctcttgccccagtgtactcctcagcttggccaccctgagctgctttccacttttcacacaaaccaaatcatctttttcctctgcgctgactgctccttcttcctcggtgcctgactagccctcacgcatccttccgtgactcagcttacactcttttcttccagaaacctctgcctgggccccaaggttgggtgagataaggctcgatgccccttatcagtgctcctgtgacatatgctactttccccagcagcaggtgtttgctggcactgtcattgcccgttagctgcttctgctacagtgtgaactctgccaggatggaaatatggctgctgggttcacagctggatccccagcaccagactgtgccaagaatagaatatgtgcttaaaagatggtcagagaattcagcaacgttccctgagggtcatacagtctagaaatacacacaagacccagactagatgcacatatagatagccctggaaaaataagaaaggttaaaacggataataaggctatttggtggctacgacgagtttattagagagggcaaccggagcccccagccccactcacggacgttctctcaaatccacctctgaaggtgcatgagataaaggagagctatttactgcacctagacgccaggcaatgaaaacggggtgagggtcgagggcagggatctgaggagccacatcaggccagccttaccttcatgttgtcaggggggtctccttggcctgtagttgcacaaacaaatatcaccaggggctcgttaatcagattcacctcaacaaaaagacacacacacgtaagacctccggctgtaaggaccgggcgtccttcccaaaacttgacccccttctcctttactcaggctgacagggcagagggatttatgtgagcagccagaccgtcttctctttcaggttccaacctcctccaggtgctaaactgaactccccttcccaaacctccttccctaaatccgccataagggaaagacccgctctcagagaaaatgcgacgccttttgggtcgatgaccccgcgaggcgggcacgccaggcctgctcgtcccccacgccgaggccctagcgagccctcaccaccgggtaggagtccagggcctgcacccggcagccaagccgccggcsccgggcctcgcgacccagtctctccgacacatcctgagccgtgcctgtctggctgccgaagagcaccagaagctgcgggctcggcatcggggygcgcccggtggtctggtctgagactaaaaactagaaggcagttcccgccggccgggttgcagggacckctccgccttccgccttccgccgtcgaccggaagtgacgcactagggacgcgccctgtgggggcatggcgtccgatcgaggcgggcgttcacgggcggccagggttgagtcccgggtcggggccgggggattgccggcgcatcagggccgagggctggggctggcggggccgctcgctgcctctcgctcgcagcagcggcggcaggcgcgggcgagggccacggggagaggagacgcagccccgcgggtggcacgctcggccgggccccggcccgcgctcaacgggcgcgatgctcttctcgctccgggagctggtgcagtggctaggcttcgccaccttcgagatcttcgtgcacctgctggccctgttggtgttctctgtgctgctggcactgcgtgtggatggcctggtcccgggcctctcctggtggaacgtgttcgtgcctttcttcgccgctgacgggctcagcacctacttcaccaccatcgtgtccgtgcgcctcttccaggatggagagaagcggctggcggtgctccgccttttctgggtacttacggtcctgagtctcaagttcgtcttcgagatgctgttgtgccagaagctggcggagcagactcgggagctctggttcggcctcattacgtccccgctcttcattctcctgcagctgctcatgatccgcgcctgtcgggtcaactagcctcaccgaggtgccggagagggagcgctggacaactagaatgttgacctcgagccgaggccctacttgcagcgcaccggaggagaggctctctagtctgaaggcaccgccggcttgcgccgagctgagtgccgggtttccctattccaatcctgtttgaaatggtttcttcagcagggcttaaaagagcagccttcatcctgaaaatgtatttccttttgtttaatgctttgagtagataatcctgaattgaggtcatgaggaggccccccaggccagacagtcctgaacccctctgacacttggaaactgaatataagtaaaatgtccaggtggactctgagtatttcctgtggatcctgggaaagtactgttgcacaaaggctgcaaagctggactcaggaatgtcctccaaccagcagcgctgacctaagagctccctgtgccgtctatccagaccagacttcggtagatgcctttgttagatctatcacatgtaaacgagcttgtatctccttccctgtgccacgagagagattggctttttattccagtctaggcagagacagaagaatgttgaataagagcacgattagagtcctgtctggttatctgttgcccaagaaaagaactctgctgtccaggcactgcttggcttactatcccagcaaagactgcagttttgtggacttttgaccaccttgggctggcactcttagcacacctgagacagatttaagcctccctaagagactgaagagaggaacaggtgtcagatactcataggcactgagatctacaaatgggaagcttgtgagtggcccatctttgttggcctacgaactttggtttgatgccagtcaggtgccacatgagaacctttgctgagatgcaaataaagtaagagaatgttttcctgaaatgaatagtggttgcctgtaaccctcaagggttaaataggatgaatattgagatactctctgctacgtggtgtagctggttacagagctgcggttttaaatggattgaaacctgtggctagagcttagtggatggtggtggtgggaatcacttgttctggagaatccctccttcctgctctaggaggtgggtaactcaggcacccccccccccaccctgtatgaagacaacaatctgggctcatgttaaagacccattgaatagtttgtgaccccagagcccatgacttcttgccagagtgtggtctttgtgggccttgttggcactctgtagagcagggatcagcaaacaatgtcctaaggcctgtttttgtatgacccttgagctgaggatggtttttacacccctaaatgattaaaagcaaaagcaggccaggcgtggtggctcacgcctgtaatcccagcactttgggaggccgaggtgggtggatcacaagatcaggagatcgaaactatcctggctaacacggtgaaaccctgtctctactaaaaatacaaaaattagccgggcgtggtggcgggtgcctatagtcccagctacttgggaggctgaggcaggagaatggcgtgaacccgggaggcggagcttgcagtgagccgagacaacgccactgcactccagcctggccaacagagcgagactctgtctcagaaaaaaacaaacaaacaaaaaaaaaaacaaaagcagaacttgtgacagagagtggatatgaccctcagagtccaaggtctcttaattggcactcttggctttggggccagaagattctctagtgaggatgcagtctgtttcgcagtgctcctgcctctcctgggtagatgccagtagcagccttcacttgtgacaagcagatgtttatccagacattgctaagggccctggggaacaaaattgtccctggcaaaaaccagtgggctaaaatatttcctgtctggggccagatgcggtggctcacgcttgtaatcccagcactttgggaggcggaggcgggcagatcacgaggtcaggagtttgagaccagcctgaccaacgtggtgaaaccccgtctctactaaaaatactaaaattagctgggcatggtggcgcatgcctgtaatcccagctactcaggaggctgaggcaggagaattgcttgaacctgggaggcagagattgcagtcagccgagatagcaccactgcactccagcgtgggcgacagagcgagactctgtctcaaaaaaaaaaaaaaaaaaaaatttcctatctggctcgttacagaacaggtgtgctgacctctgctctcatgcatcagcctggccagcggagtgcggtgtcagcctctgcctggcgtgtatgcttagttgtgtaaaccatggaggggcttgcgttggaggcagcttatctggtttgttgctacgacactgtgtccagcctgggattggcataacttttgtcaaagccagattcaagctgaacagtgggagtgagtttcctcgtaatgttatttatttctagattttgtgttttgtgtgttcccctgttttattttggtagttcagaattgggcaaccctactagggtagaagtgatgaacatcagatgcttcctttagaaaggtgatttgaggagggccctaagggaggagacacttggcttctggaaagctgaaatgaaagtttattctggccaggcccagtggctcacgcctgtaatcccagcagtttgggaggccaaggcaggcagatcatgaggccaggagttcgagaccagcctggccaacatggcgaaatcccgtctctactaaaaatacaaaaattagccgggcgttgtggtgggcacctgtaaccccagctacttgggaggcgaaggcaggagaatcgcttgaatcctggaggcggaggttgtagtgagccgagatcgtgccactgcactccagcctgggtgacaagagcaagactctatctcaaaaaaaaaagaaaaagaaaaagtttattttctccagcttaatggagtggcaggagaataaggcaagcattaagctagcggctgctgcagactgtcatggggcacagaagctgagaagggcatccccaagttaaaaaaaaaaaatctgttctgcatcattgcagagacccaggcgaccttggtgtgggaaacagcagtgtctactgagcaggctgctgactgcagggcaggtgatggaaagaaggtgatgtccgtgcactccaattccccttctccccgtgactccaagcgrtctccctattgtctgcaggcttgaaaggctgtggaagcactctgaagccctccctggggcagaagggacttgtcagccgggaggctgtgccctcagggtcatggtatccggagccttgatgaggggacgttcaaccgatgggagaggagtaaccttaacgtggcagcagggtggaataatcagacacaggggtcggccctatggggcccaccgttaccctggcttttttttttttttttggctctgaatgcattggagagctctccaagcatgcagggccctgccctggtgaacctgcttgcgtgtggcgggagaggctgcttcctttgtgcctgctcctgcagatgctttttggggaccacggatggcaaggttgggttaagaggctcccacctgggcagcctataaaaactagggatttctgagaaactggttcgttggggctgctcggggctccagaattggcatttccaagccccgcaggcacctgccggaggtcggaggacccctggtgaaagcagggtccgggccagagtgtggcctgtgcaccgtccacggacacgggtgccttcggtcctggagcagcgcccttcctgcaccgcgctctcagcggacggaacaggcggcctcggtgctggcagcatgaggaagtcccaagctcagccaaggtcactcggggcgcagggtccaggggccgcgcacccggctacccccagggacgccgggagctgagagcgcagaggcggaagtggggtctgccagtgagcggcgcgaggcaccggggtgtgtccggggggccgtccccaatggaggcnnnnnnnnnnnnnnnnnnnnnnnnnnnnnnnnnnnnnnnnnnnnnnnnnnnnnnnnnnnnnnnnnnnnnnnnnnnnnnnnnnnnnnnnnnnnnnnnnnnnnnnnnnnnnnnnnnnnnnnnnnnnnnnnnnnnnnnnnnnnnnnnnnnnnnnnnnnnnnnnnnnnnnnnnnnnnnnnnnnnnnnnnnnnnnnnnnnnnnnnnnnnnnnnnnnnnnnnnnnnnnnnnnnnnnnnnnnnnnnnnnnnnnnnnnnnnnnnnnnnnnnnnnnnnnnnnnnnnnnnnnnnnnnnnnnnnnnnnnnnnnnnnnnnnnnnnnnnnnnnnnnnnnnnnnnnnnnnnnnnnnnnnnnnnnnnnnnnnnnnnnnnnnnnnnnnnnnnnnnnnnnnnnnnnnnnnnnnnnnnnnnnnnnnnnnnnnnnnnnnnnnnnnnnnnnnnnnnnnnnnnnnnnnnnnnnnnnnnnnnnnnnnnnnnnnnnnnnnnnnnnnnnnnnnnnnnnnnnnnnnnnnnnnnnnnnnnnnnnnnnnnnnnnnnnnnnnnnnnnnnnnnnnnnnnnnnnnnnnnnnnnnnnnnnnnnnnnnnnnnnnnnnnnnnnnnnnnnnnnnnnnnnnnnnnnnnnnnnnnnnnnnnnnnnnnnnnnnnnnnnnnnnnnnnnnnnnnnnnnnnnnnnnnnnnnnnnnnnnnnnnnnnnnnnnnnnnnnnnnnnnnnnnnnnnnnnnnnnnnnnnnnnnnnnnnnnnnnnnnnnnnnnnnnnnnnnnnnnnnnnnnnnnnnnnnnnnnnnnnnnnnnnnnnnnnnnnnnnnnnnnnnnnnnnnnnnnnnnnnnnnnnnnnnnnnnnnnnnnnnnnnnnnnnnnnnnnnnnnccggcccccgcccgcggcccccagcccgcccgccgcgcccgggccccgcggtggcggggcgagccccggggcccggcgcagcgacttcctccagaagaccggcagcaactccttcaccgtccacccccggggtctgcaccgcggcgcgggcgcccgcctgctctccaacgggcactcggcccctgagccccgggccggccctgccaaccgcctcgcgggctccccgcctgggtcgggacagtggaagccaaaggtggagtcgggggatccctccctccacccgccccccagccccgggaccccgagtgccactccagcctcaccccctgccagtgccactcctagccagcgccagtgcgtctccgcagccaccagcaccaacgactccttcgagatacggccggcccccaagccagttatggagaccatccccttgggggacctccaggcccgggcgctggccagcctccgcgcaaactctcgaaattctttcatggtcatccccaagagcaaggcctccggggctcctcctcctgaggggaggcagtccgtggagctgccaaagggagacctgggcccggcctccccgagccaggagctcggatcccagccggtgcctggaggggatggtgcgcctgccctcgggaagagccccctggaggtcgaggcacagtgggcagtcgaggagggggcctgtcccaggacagccaccgccctcgctgaccgggctattaggtggcagaggccgtcctcaccgccccccttcctgccggctgcttcggaagaagctgagcctgctgagggcctcagggttcctggcttggccaagaatagccgggaatatgtgaggccggggctgcctgtcaccttcatcgatgaggtagactcggaggaggccccccaagcagccaaactaccctacctcccgcaccctgccaggcctctgcaccctgccaggcccgggtgcgtggcagagcttcagccccggggcagcaacaccttcacagtggtgcccaagaggaagccagggactctgcaggaccagcacttcagtcaggccaacagggagcctcggccacgggaggccgaggaggaggaggctagttgcctcctggggcccacgttgaagaagcgctaccccaccgtgcatgagatcgaggtgattggcggctacctggccctgcagaagtcctgcctcaccaaggctggctcctcaagaaagaaggtcagtggtgggggcagggccactggctggcagggagagagtgacagctcacagaactgtgggggcagcacctgccctgatcccaggacgcttggcctgggcaaaggatggtttctacatggacttgaggcgagctggggctgggtgggccgtgctgggtccagggccccagtggagccccctgacttgggccgtggggacagctggcctgctgtgtgccttgccaggctgctggagagcgacagggcagmcagtgctatgtcccttgccagttgttgtggctcatctggaattagctgggcgggtctgtccctttgtgagtccagctgaaagaagcagacctgggcttgtgggttcctccctgggcttggctttgaggggtggcctcacatggtctcctggaggcccgctgcatgggcgccaggcgccacgctatgaatgggaagggccagatgatcggggttggctggatcctcgcatcacagtcagccttggggtgcagcccaccagccagttgggagagggccatcagctccccagaaggcacactggttgggagctgggcaggagtgccgtgtatgcctgttctgggcctgggaagcttgctggggagaaggggccttcggaggctctgagccagccaggcaggggagtctccctcttggccagtggcctggaatcctctgggcacaggaaaaaaaatcttcagattctttctggtaattcctgcacctgtatttgttccctggggcaaattccaagggcagctccatgtgacttcccggtctgcggtgacctgtcaggaagcaggtgtacctttcctggggactgagggggggcgcctggggcgcctcccttgggtcttcctatccaggcactgccccagagccattgctggctaggctcacccctgaggcgggctgtcctccagcctcagtttccccaggctggggatgggaccttgcaggctccctcagcagataggctgctgcctccctctgtttgcttcctgcccgggattggccttggcattgcgcctctccctgtgccatactcccctcctggaaccagggcgttggtgcccctgccggctctatctgccggcccaggcatccgtgctaaccctcctgaggtgcttccagtgggggcttggggctgggtccagggcccctcccactcctggagccacgtgggtctatctccccgaccctcgcccgagcatcaccccagcccatcaaggtggggtcagtctgatagccacagcctctctcctccagctcctgtctgcctctccctcccctgcgtctgtacctttggccctggctgctgtgtgaggtgggcacctcctgggcttgccccagaggtggcagtggggacagctccccctttgtagagagaaactgcgcctcagcttgggagtcagacggggtcatggggcttgtggggcgagtacggagttcaggtttctgtttctagaacccctccccttaacctgtgtggccatccctgggagcctggcttcttcctgggacttgaggccactgcctagagtctggccatcttgccctcagaagggacagaactgggctgggcgcggtggctcacaccttgtaatcccagcactttgggaggccgaggcgggtggatcacgaggtcaggagttcaagacaagccttgccaaggtggtgaaaccccgtctctactaagaagatataaaaaaattagctgggcgtggtggcgggcgcctataatcccagctattcaggagactgaggcaggagaattgcttgaacccgggaggcggagcttgcagtgagccgagatcgcgccattgcactccagcctgggcgacagagtgagactctgtctcaaaaagaaaaaagcaaagaagggacagaactgtgggggtcatttgcggctgggttagggtcagaagggcagggtgggggccggagggccaacaggagcaggaagatgcagtgggggagaggctgagcctgggaaacaggccctggaccagcaggagggaggagctcgggccagcctgaaggggtgggggtccagatggacgatacctggcatggccaggtggcccgggcagggccctgccagagcagcatgacctgctggctgtgacttcccgcctgggtacaggccagctgccctgcctgggaagagccagaatgtccatcaggaggggacagaggcgtggggctgccctgcctttcagaatggcttgctggcctcggcacggtgggctgtggggcagggctgtcccatgtactctgtggcccctgggccaggagcactcactggtgggggtgcgaggtgcccctgcgggtcctgtgcctggccttgtctgaccaccctggccagcctttttttattttttgttttttgagacagagtcttgctctgtcgcccaggctggagggtagtggcaggatcccggctcagggcaaacttcatctcccagggttcaagcgattctcctgcctcagcctctcaagtagctgggattacaggcgcctgccaccatgcccagctaattatcgtatttttagtagagacgaggttttaccatattggccaggttggtctcgaactcctgacctcagatgatccgcctgccttagcctcccaaagtgctgggattacaggcgtgagccaccgtgctgaccccagcctttggttgggaccactggctgtgacccccgggcgtgggggtggagtgcagggattgcagggcccggagtctagcaggacctgactgtgggccaacggctcactgtgcacctcagcggctggcggtgctgctgcttttcctggggtacaggtgaagggcagctcttcagtggagttgtctgggtggtgggagtcggtgaggggcctgccccrgggctggctgtgcctgcacagggtatgatacccttgcccgcctccgaggggtgcagccctgctctgggcagtggggagctgctggcctgtgtgccggggtgggggcctgcctggcaggcacaggcccacttaagttatccattggcagaagcggcaggtgccccgtcttgcagggctgagcttggagcagactgctgtgtgctgcagccacgcccgggctgctttcctggagggtgggacacccattctcatcctcacacctgcctcccttgagactcggcgctgtagcttttcctcttcgtggagcaccacctggcctggctcctacctgtctggcggccccttcccgtcccctctgccctactcccctcctcccctcttggctctctgcccagctggagcgtgtcagtgtccccagggctcagtcctggacacccagggccgtccgccctcacctgctgtgcaacttccgcctccactcccaaggcctcgctctctgatccttagacccaagagccaccctgacatctgcccttcctactgacaccacctcctggccagcaccaagccccaggctgggctcctccctgcctctacccctgtgcaggcagatcctgggtggccagaggctctcactgttgttggctgagtcccttcttgtcagttttcctttccttctcgtctctccgccagctcttcccataggtgccgcctaggtggtccttctgaagccgggaaccccaggagcggcctggacgctcctccctcagctttctcatgggtggaggccgtgcctggcgctggggccacacttgactcagggagcacccagcttcccgggagcctgctctgggcattgcactcgtgcagcctggtctagggtccggccacccgtgggagccttggctggggctgcgtgggggatgggaggcaggtagctgtgtgcagggaggagggagaggcggggctgggctcagctcacacctccatctgggcaggttggggctggctgcttggccctttgtcccaggtggaggccaggccctttgrtaaccaaagctaggtgtgcacaggcagggtgggtggagcgagaacagaagggtcctgagaagccgggaggctctgctgggaggctgggctgagctgggacccacctgcctgctctgttggctgtgccaggcaaagtccctgataggctgcggccaggtgcgtgcggtcccagaccctggccacaccctctgcccatcctgcgtctcggggtcttcaggctgcccaccgtatgagtcacggggtgtcctgtccccacagtgggaggggagggctgtgcgagtcagcaggcaccagcccagctgaggagacctggggaggcaggacgtgaccagagccccgggccccagctgagggcagacaggggctgcctgtccaccccccgccccgcaccgcctggccaggctgtaccaggctcagggcccatgtgcacccagcccccgcggcccccctgctgggaccggtcatgtgcacgagtgagggcactaatcccgcggccctggcagccagcccttctgtgttctcagccgtgggggctgggcctggagggcttcggggtcatctgggttagctccacatatccagggcgactggaaaccccatttgctgctggacttcggggctgtgggagagctctagccaccagccctgtcctgccttgagcacctccacctggggtatctgtcccaaagcatgagtctgggagggccgggtgaccccctccccaagtgggctggcagtgggtgggtgcctgtgaggtctgtcccagcctctccctgcctggcctcctgtgggatgagcgttggagggccaggtgggcctagccacaggcagggcagttaagggacaggagcgggtgctttcctccttgttttgtctggcccaggtggcctccccctcccccgctcatccatgcagacggctggggtgccggggcctggggtaggggtgcaagcaggcagctgagttgcccagcagggctctgtgtgagctgtgctgagaggggaagctgggggtttgggcacaaagcgtggccccccagctgtgggaggcgggggtattcgtggtgagaagggacctgagggtacacctggctgtgtgggccgtgtggccgctgtgggagagagcatgatggcaagagtgtgtgcccttggccctgtcctggcagccctgtgtggcctcctcggctgcctcctgagaggccgtctcgtcctgtgcctggctgcggtggttctctgcctggggcccggctcctgcctccgggtccttctaggggaggaggaggaacttgagctgctggtgtcctgtgcccaggaagagtttaatatttcgagctccctcagggctgcttccatctgctgcaagcgggggccgctcatattcattagggaccactggggccgggctgagtgcagctgagcagtgggagctcggctgttgtggggagcttagccccatgcaagccccgttcaggggaggtggagagtcctgaccattggtccccactgcccccattacccctgggaaccagcagccctgcctgggcttcaaggccactgggagaaggaaagaatttgctcagatgtgaaatcttgcagcctacgaagtggggatggaggacgagggccagaggggcagcagggtgaggaaggggtcactgctggggttgctggcacccaggctcagtggaggcagccccctactctgcacagccgcaggccaactctcaactatgttaggtgggtgatggtgcctgaggctactgcctggccttgacggctcacagaggcccctgttcacagtggggggtccatgctctgctggattgtccaggcatccagtaagccaggacatgaacttggctttagagagaggccccagacaccagcaggagctgcctggagcctagagtgcaaggcccctgaggggacagcctcttttccaccctgttcctgctctagagctgcttggtgggaggggatgtgtccaccccagtttccccccagctggcactctgcccagacagcagagcaggaggggcctgagatggtagctccaggagctggtctagaggcttctggggacccagaggctttgggctcctggtcctggtcagcgtttggtccctggctggaatggggaggggaggttgacccccagggtggagggatggacgcctgcagggtccagctggagagctctgtgccccctcctggagcccccggaacggttgatggtgtgtctggcgccccacttgggtcagcctcatcctgagggctgaacctgagcccctggcatcactgtgcccatgtgggccctcagccctcgttcacgtgactctcactcccagatgaagatctccttcaacgacaaaagcctgcagaccacatttgagtacccttccgagagctccctagagcaggaggaagaggtggaccagcaggaggaggaggaggaggaggaggaggaagaggaagaggaggaagagggatccggctcagaggagaagccctttgcactcttcctgccccgggccacgtttgtgagcagcgtgagacccgagagctctcggctgccagagggtagctcaggtgagtgcccacctgggggacaggcagcctgggaggggtggagcctggtctgtgtccacgtctgcatgtgcacctccattcacaggcctgtccagctacaccccgaagcactctgtggccttcagcaagtggcaggagcaggcgctggagcaggccccgagggaggcagagcccccgcccgtggaggccatggtgagatgcgggggagtggagcgctggggggagtctgacacccgggcgagcccatgtgtccacattctgtcctctcactttcagctcacacccgccagtcagaatgacctctcggacttccgcagcgagccagccctgtatttctgagcccagcactgccaggaccaaggctgagcccagctgtgggagtcccggaagctgggcagtagccagggactactgcacccgcttctgccttgtttggcctcactgtatcccacccacccctcctggccctggaagcagctagggtgcctcctgccatcggggccaggtctgggtctcactccccggccctgatttgggagggtccaagggggaagtggggtggggaactgcctgtgggtgagtgccaggggcctgctgggtggtggccatctgcgacccggcagggggctgtgcagattytgcacctggccattccctgtcctgtctcctcagcctgcctcacagtggccatggggtgtcggggtgaagggctgtcccagctacttgtcctctgcaggaccctaagcccctgcccgcagcccacatgccctytgtgatgagtggcgtctttcctgcctctgatgatggactcaataaacagcactggacaaggctgctggtgtccccactgcgtggtccttggctgagaagggagcaggggcaggtctctgcaggaagaggccacatggggtacagtgggccccagtttgcacgtctatgccagggtgtgtgggaggtgaccccgatctggtacccccactccttgatgtcccagtggccaaggctctgacctcccaacttccatggcctgttaacctgttgcccctccaccccagcctcccagagctggcactgtgggaggtaggatgacaggcctgctgtcaggggcctagacttcaggtgggagggtgagagtgttgcagctgttgggcctgaagtggcttctctgaggggcccagagcctggggagggaccaagggaagggcagcatgagggcagcacaggggacggtgtcttctgctgggcttggcgtgccccccgacccacaggatgaggcaggccgggagcagcgcctgcctcagacggccagagctggggctgtttacagcccatggaacccaagcaccatttcctccctggaggatcaaacctaagagcaaagagataaagagatgctgtctggccaaactccggcggaaggagagtttggtgtatttccctggtcgggttaggcccagctcttttctggaccctctggatcaacacatgcctcccaaatcggcccagtcctcgggccatgcttggttgctgcagggacaaaacagaggccccagggcacatggaaggatggaagtggccagtgcttggtgtgcggccagggaaaggtgggcagcagggcctggtggcagcagtggtgtcatcaggccaagcaaaacttgcaactgaggaaccgacgggggtggggggtgtgaactccccccagtaccttgctgagagggacctgaatctgaggcagctgctggatatgnnnnnnnnnnnnnnnnnnnnnnnnnnnnnnnnnnnnnnnnnnnnnnnnnnnnnnnnnnnnnnnnnnnnnnnnnnnnnnnnnnnnnnnnnnnnnnnnnnnnnnnnnnnnnnnnnnnnnnnnnnnnnnnnnnnnnnnnnnnnnnnnnnnnnnnnnnnnnnnnnnnnnnnnnnnnnnnncctgagaggagggtgagccgtgggccagtcaggggaagaggaccggcggccctgctggggagggctcagggtggggctggcctggggagggtgggcaccctcagcggtgtccctgaggctagtggggcagtcacagggaggccactccagaccctcctccctcctctcccaagggggagcctcaggctctggctctgcaggtgtctggcagccccatgctgttgatacgggcaagcagcaggctggcacggatctttacaaagataatctttattcataatcacaggccacaggggtgagacctgaggtttgggttctgtggtgaaggagaacccctgtcctcctgtcccttgccctgggcctctgctggctgaggagggacaaggtgagggggcccccatggtgctcagacaaccagagcctccctggcagggcaggagtgtgggtgccacagagacaagccccttgcagagctgacctggagcccaccatccccatagcctgtgtgagcatgaagcgaggacccccgggtgggctgtgccctgggcttgtcactgatgccagtggaggctggcacctgcccctctcggcacctgagacagtgagggaaggtagctgctgccgtgaagaacaaagatgctctgagcacacacttgctggggctgagctgaggggcacacggaggcaggccctgcccgtggtctggtcagctgtccctgccgccgctacttttctggtctggggctgtagccttggtcaggttcccagcttccctcttgagaacgctgagcaaagtctgggagctctccaggatctggggccagagaagtgagaaggttgttaatgttcacctgttggtaaggtcctaagccccagctgtcctcacactcaggtgctgggacctggctgggggtgctgtagccaagggatcctgtgtgggggaaggcggaagcccaaggggactggcagacggggtggcagggccctcttccctccggaatctgacccaaaacacttcctctccaccctcaaagccaggctgggttagcactggcccgtgctgggtgctctgcccaagacctggctcttcacactgagcagaaataaccacatggctagcgagaaccggataaagaccaggacccaggatgccccaggccccacagacagccccacagtcactcccacagcagcctgggttcctcaatgggcctggccacgctgcccctgcccgaaatgccagcgaggcacagactgcccacagccgggagccccagccggtcctgacgccttgccgtggcaacacccctgccgtgcctatcccctgatgctcggcctggcctcccgagctccaccttgaggtaggcggcctccgtctccgcgatggtccggtcgaactcgttgcgagaggcaatcttgcgtgccaggttctcgttgacgcgggccagcttctctgtcagctgcctcacctcattctgcagccgctgcttctcgtcctcctcctcctggatctgccggcacagctcctcccgcttctggcacagctcctctatgcctgggggccgggaggggcggcgctgtgggcccagggcaggagcgcggcggcggagggcgggcctccttccacccgaggaagccagagtcaggcaccacccccgagcgcccggcgcggggcctgcgagccagcgagggctcgggccacggacacccggcctccggcacggagggctctgctcagccgcgcgatgcccgcagcgaggcgggtccaggggcaccccgctgcgagccgggaacccggccctgcggccctcccgacctccccgtcccggctgcgccgctcacacttgaccagctcgttgttgtagttctgcagcgccgcgccctgctgggtcatggtcaacgccgcccggggccccaccaccccaaccgccgcggaagcagcgctgtccgcgcctgcgcacgactcccccacggcgcgccgaactagcgcgtcatcgctgagcgccttgtgcgcgtcatggctgcgcgtgcagacgtgcgtcatcgccgcgcgccgcgccgagcgaatctcggagtcggtgggtgcagatggcggcggcagttgtggtggcggagggggacagcgactcccggcccggacaggagttgttagtggcctggaacaccgtgagcaccggcctggtgccgccggctgcgctggggctggtgaggcctgggaagagaggggcggcnnnnnnnnnnnnnnnnnnnnnnnnnnnnnnnnnnnnnnnnnnnnnnnnnnnnnnnnnnnnnnnnnnnnnnnnnnnnnnnnnnnnnnnnnnnnnnnnnnnnnnnnnnnnnaacatgacagagagagagtcccagggattcctgtgcagcgtgtcctggacacaggtgtctctcttctgtcactcaccttcagtcccacagtattcatgccttgaccctggtaaggccctatgtggcttgtgtctgcagcagcaaatttcttagcaactccaaacttcctggactctgcagaattccactgtgccttttgtcgatcctggggaggaatgattctcaccctcgtcgacattccttgccctgtaattgtgaacagaagcttgctgctgcttctctccaggaagatcaggtcactgtgagggcaagcagtctcttgttagtttggagaggagaggggtttgttgtgagagacaggtcctgttgtagttctctagcaattgtcatacccttggccatttgtggtggttttgtcacattgaacgggggtgtagccatgcagctacttgagaggtcttaggtggactaaaggtggactaaaggagtgctccttttgctggcaggggtcagggagaccgtgaagggcttctgttgggctcatccctgcaaaagttacacggcaacttttctcatcctcctcttgagtccttttgtcactgtagaccagagactgcactgaaaggcacaaacagtggcatctgtacctctgcggccagggtagcagtgcagttggttgtcgtttcagagttgatcctaggagataaggctagggcccccgacagccacacctgctgccactgatcacatggggaaggccagtgtccctacctggatagaggccagctgggcggggacagcagagcctgggagtgctctgtgctcccagtggcttcttgaagcctttggtacaaccgccccccacagctgaggattgtggggaggtgtgtgctgggtgtgtgtgtgtgtgtgtgctgcatgcactctacaggcagggcagtcctggcatggggctgttctgggctagaggggccggtgtgtgctctgggtgccccatggccagggctctcctctannnnnnnnnnnnnnnnnnnnnnnnnnnnnnnnnnnnnnnnnnnnnnnnnnnnnnnnnnnnnnnnnnnnnnnnnnnnnnnnnnnnnnnnnnnnnnnnnnnnnnnnnnnnnnnnnnnnnnnnnnnnnnnnnnnnnnnnnnnnnnnnnnnnnnnnnnnnnnnnnnnnnnnnnnnnnnnnnnnnnnnnnnnnnnnnnnnnnnnnnnnnnnnnnnnnnnnnnnnnnnnnnnnnnnnnnnnnnnnnnnnnnnnnnnnnnnnnnnnnnnnnnnnnnnnnnnnnnnnnnnnnnnnnnnnnnnnnnnnnnnnnnnnnnnnnnnnnnnnnnnnnnnnnnnnnnnnnnnnnnnnnnnnnnnnnnnnnnnnnnnnnnnnnnnnnnnnnnnnnnnnnnnnnnnnnnnnnnnnnnnnnnnnnnnnnnnnnnnnnnnnnnnnnnnnnnnnnnnnnnnnnnnnnnnnnnnnnnnnnnnnnnnnnnnnnnnnnnnnnnnnnnnnnnnnnnnnnnnnnnnnnnnnnnnnnnnnnnnnnnnnnnnnnnnnnnnnnnnnnnnnnnnnnnnnnnnnnnnnnnnnnnnnnnnnnnnnnnnnnnnnnnnnnnnnnnnnnnnnnnnnnnnnnnnnnnnnnnnnnnnnnnnnnnnnnnnnnnnnnnnnnnnnnnnnnnnnnnnnnnnnnnnnnnnnnnnnnnnnnnnnnnnnnnnnnnnnnnnnnnnnnnnnnnnnnnnnnnnnnnnnnnnnnnnnnnnnnnnnnnnnnnnnnnnnnnnnnnnnnnnnnnnnnnnnnnnnnnnnnnnnnnnnnnnnnnnnnnnnnnnnnnnnnnnnnnnnnnnnnnnnnnnnnnnnnnnnnnnnnnnnnnnnnnnnnnnnnnnnnnnnnnnnnnnnnnnnnnnnnnnnnnnnnnnnnnnnnnnnnnnnnnnnnnnnnnnnnnnnnnnnnnnnnnnnnnnnnnnnnnnnnnnnnnnnnnnnnnnnnnnnnnnnnnnnnnnnnnnnnnnnnnnnnnnnnnnnnnnnnnnnnnnnnnnnnnnnnnnnnnnnnnnnnnnnnnnnnnnnnnnnnnnnnnnnnnnnnnnnnnnnnnnnnnnnnnnnnnnnnnnnnnnnnnnnnnnnnnnnnnnnnnnnnnnnnnnnnnnnnnnnnnnnnnnnnnnnnnnnnnnnnnnnnnnnnnnnnnnnnnnnnnnnnnnnnnnnnnnnnnnnnnnnnnnnnnnnnnnnnnnnnnnnnnnnnnnnnnnnnnnnnnnnnnnnnnnnnnnnnnnnnnnnnnnnnnnnnnnnnnnnnnnnnnnnnnnnnnnnnnnnnnnnnnnnnnnnnnnnnnnnnnnnnnnnnnnnnnnnnnnnnnnnnnnnnnnnnnnnnnnnnnnnnnnnnnnnnnnnnnnnnnnnnnnnnnnnnnnnnnnnnnnnnnnnnnnnnnnnnnnnnnnnnnnnnnnnnnnnnnnnnnnnnnnnnnnnnnnnnnnnnnnnnnnnnnnnnnnnnnnnnnnnnnnnnnnnnnnnnnnnnnnnnnnnnnnnnnnnnnnnnnnnnnnnnnnnnnnnnnnnnnnnnnnnnnnnnnnnnnnnnnnnnnnnnnn

SEQ ID NO: 96793 - DNA, 24590 bp, Homo sapiens
  misc_feature (1)...(24590): n = A,T,C or G
ctgtggctgggaggtggtggggcagtgtccaaaacctctctgactgggctgctggattagtggggagactttgaaggctctgggaggaggtggttagggcttagcagcctgggacttcccaaccctctgtctctccaggtgccaggaagccaccggcctggagcctaaaacagtgattgctgggtctatgtaccacaccccggggggcctctgacctcagggagggaagggcccttctggccctaggctggccctcctgccagactgcagtgcgacctgcgctgacttttccttttttttttttgagacatagtctcactctgttgcccaggctggagtcagcgctgcgatctcagctccctgcaacctctgcctcctgggctcaggtgattctcctgcctcagcctcctgagtagctgcgattacaagcatgcaccaccatgcccggctaatctttgtattttcagtagagatggggtttcaccatgttggccaggctggtctcgaactcctgatctcgggtgatccacccaccttggcctcccagagtactgggattacaggcgtgagccactgcgcctggcctcagctgactttactaacagggtctcccgggtgcttttgcagagcactgctggttgcattcactggacatttttttttttttgagacagggtcttgctctgttgcccaggctggggtgcagtggtgtgactgtagctcactgcagcctcaaactcctgggctcaagcaatcttttgcacctcagcattctaagtagctgggaccataggcacccagtaccatgcctggctaatttttaaattttttgaagggaagggggtctccctatgttgcccaggctggtcttcaactcctggcttcaagtgatccttctaccttggcctcccaaagtgctgggattacaggcgtgacgttctgagcccagccaggcctcactggacttctaaaagttggacggtaggccgggcgcggtggctcacgcctgtaatcccagcactctgggaggccgacgcgggcggatcacggggtcaggagatagagaccatcctggctaacacagtgaaaccccgtctctactaaaaatacaaaaaattagctggacgtggtggcgggcgcctgtagtcccagctaccccggaggctgaggcgggagaatggcgtgaacccgggaggcgaagcttgccgtgagcccagatcgcaccactgcagtccagcctgggcgacggagcgagactccgtctcaaaaaaaaataaaaaaagtgtgatggtaaaccttgtgcatcagatgttctagttcgtcctccagaaggcagaaacttagagtcatgcaaactaggtcaatttgcaagttcatatggaccaagaagaatcagggacaaaactccatgaagacaggtttggctctgacgtcacgctgcatgaacagcacgcttcgcccacggtggagcaggcacgactgctgacggccggcttctgatggaacgtttcaagggtgaggagctccagggagtgtctatcatggcgtagaacacacggttcccacatccttattagaatagaaggcacataaatacctttcaaggaaatctgttgtgactggcgaggcttcaggcaccagtccctcgggtgatccagatagaaaccccaaagccaaaagctctgcacgctcccagctcacctccagcaggagggacacaggggcttgcttggggtcgccaaacaggctcaccgggtggtcttgcccccaccgcgtctctagcctgaggcccggtcactcctggaaagggcgttccttctcgtcacactgttggtggcagcttcatccagcgtgctttcatctgatcctctgaggggggagggcagacagaactttccacaacatgagaaaaggcaatcttcacatcagaggagagcctgtctccagtgtacaacgtttcgtctccaggcttcacgtaaacaagccagaaaaaacggcctggctcctcccaagtgacctggaattccaactgtccatacctttccctgagtccctagaaatgcagccacgctgggagccgacccccctcagggtgtctgcaggcccgggcctggctagaggctccagggccactccagtgtgtgactggagaggtggtgtacccgaggcgaggggcccagggggcaggggaggggacagggggtgcacctgggtaccaacgcaggtccaggaaatttcgccaggcagggaccctccgtcagcgccgcttctccagcagcatttttccttttactctttttattttattttttaaattttttattattattatttttaagatggagtcttgctctgtcgcccaggctggagtgcagtcgcgcgatcttggctcactgcaacctccgcctcccgggttcaagagattctactgcctcagcctcctgagtagctgggattacaggcgcacgccgccacatccggctaatttttgtatttttagcagagacggggggtttctccatgttgtccagactgatctcgaactcctggcctcacgtgatccaccctcctcggcctcccaaagtgctgggattacaggtgtgagccactgcacccggccagttttaaatttttttaaagcaaaggagtctcactatgttgcccaggctgcttaaacccctcgcttcaactgaccctccagccttggcttcccaaagtgctgggattacaggcatgagccactgtgcccagccctcccatagcatttggccaaggctttgcacctagaggtgtctaatatgtttgctgatttgatttcgttggatgcagatcagcctaatgatgcgaggctgttggtggcccagctctcctctgcccctgcaaagagctgctggccagtcttggttctgtcctcattcaggcctttagtgaccacctgcagggttttaccagcattatgggttgactcatgtgtctccttaattaacgttgaagtcctagccctcaagacctcagaatgtgaccgttgtttggaaacaggatgcttgcagatgtcactggttaagatgaggcaatacccaactataactggtgtccttatacaagggggtgatgtgaacagtgacaaaggctgggagaacaccatggagatgaaggccgagatcgtggcgatgctgctagggccaaggacaccaggattgctggcggcaccagaagctggggagaggcttgcgacagacgctcctcagagcctcaggaggaacctgccctgctgaaacccggatcccagatttcagcctccagagctctgggacggaccgtcttttttttttttttttttttgagacggagtcttgctccatccccaggctgtagtgcagtggtgtgatgtcagttcactgcaacctccacctcctgggttcaagcaattctcctgcctcagcctcccgagtagctgggactagaggcgcctgccaccacacccagctaatttttgtatttttttttcccgagacagagtctcgctctgtcgcccaggctggagtgcagtggcgcgatcttggctcactgcaagctctgcctcccaggttcacgccattctcctgcctcagcctcccaagtagctgggactataggcgcctgccaccatgcccagaaaattttttgtattttttagtagagatggggtttcaccgtgttagccagatggtctcgatctcctgacctcgtgatccacctgccttggcctcccaaagtgttgggattacaggcgtaagccaacgcgcttggcctttttttttgagatggagtcttgctctgtcacccaggctggagtgcagtggcacgatctcggctcactgcaagctccacctcccgggttcacgccattctcctgcttcagcctcctgagtagctgggactacaggcgcccgccaccacgcccggctaattttttttttttttttttgtatttttagtagagacggggtttcactgtgttagccaggatggtctcaatctcctgacctcgtgatccacccgcctcggcttctcaaagtgctgggattacaggcatgagccaccgtgcccggcctaatttttgtattttttagtagagaaggggtttcaccttgttggtcaggctggtctcgaacacctgacctcaggtgatccacctgcctcggcctcccaaagtgctgggattacagggttgagccaccacgcctggccaaccatctgttttttaagccactcagtctgtggtctgtgaagacagccccggcagactcatccatccagcttcaagtgctgcagtgctcctagcacaatcgatcgctgtccctgacaacaaagacctccctggtcaactctgtgtctgtgtcccatcccatccacttgctcatgtcctgtagtccaagccctactttggacctccactggggctgttgcaaaagtaaaggcagccagcaatgaagagcctgttggaacacgagttttaaaaattcccttggctgggcgcagtggctcacgtctgtaatcccagcactttgggaggccgaggcgggcggatcacaaggccaggagtttgagaccagcctggccaatatggtgaaaccccgtctctactaaaaatacaaaaattagccagacgtggtggtgcatgcccctgtagtcccagctactcgagaaggtgaggcaaaataattacttgaacccgggacgcagaggttgcagtgaaccgaggttgcgccaatgtagtccagcttgggcgacagagtgagactctgactcaaacaaacaaacaaaaaaattcccttggctgtgcttctagaggtaagatcacaggggccggggcagagagagcacaccacccagggtgtgatggtccctgaacgtggagagcaaactggacaccaccttaagtgtgagtatgtgtgtcaaacctggaatgcagagacactatgcagggtgaacccatgagtgtgtagggaataccctgtcccctgcaggtgtgtgaggcaggggagccaggcacgtggaggaaaagtcgcaggactgactgagcaggagcctgaggcactgagatcccagccaaggatgcctgcggggtttctgagcaggaggcagcaccatcagagtcattttttttttttttttttttttttttgagacagagtcttgctctgtcgcccaggctggagtgcagtggcacgatctcggctcactgcaacctccgcctcccgggttcacgccattctcctgccccagcctcccaagtagctgggactataggcgcccgccatcacgcccggctaattttttgtatatttagtagagacggggtttcaccgtgttagccaggatggtctcgatctcctgacctcatgatccgcctgcctaggccatcagagtagttttgggaaaaccactgagagtgaggcaagccacgctggaaggtgaaaactgacaggtagggagatggaggggctaaggcctgtttcaccacagcacggtggacctgtgcttctgcagatgtggagggggtggccgcccctcactttccaggaggtagagagcaaaagcccttccaatgaccttggtacctactgtgcccttgatctcgcgttcctagctatctcatgggttctgcaccggtgcctcctcctgccctcggtaaggcaccttctaggtccagctgtggggcagggagcgacaggcaggaatgatctgacccctttggccgggcacggtgacagatgggctgaaagatgagtcactaaacatgatctggggtgcggggcgggggtgcagctcagtttcagcccctcgcgccggggaggatgaccgtgcagctttatatagcccctgagccctatataagcaagtcagaggccggggctcgtccgacaggagccctcaagctgatctggtcgggaccggatacattattaaccccagtgcagtagggtccccaggggcaacctgccccacagcgcccaagatgcctagcagaactgcccgctatgcccgctacagcccacggcagcggcggcggcggatgctggctgatcgcagcgtgcgtttccctaatgatgtcctgttcttggaccacatccggcagggtgacctggagcaggtggggcgcttcatccggactcggaaagtctcccyggccaccatccacccctcaggtgagcaaagcctggaagagctggccagggcctgtggggtggtgggagaggccagcaaggaggacctgacctggggctcagtcttgacccctcccgtcctccctgcccaggcctggccgccttgcatgaagccgtgctctctggaaacctggaatgcgtgaagctgctggtcaaatacggggctgacattcaccagcgagatgaggcgggctggacacccctgcacattgcctgcagcgatgggtaccctgacatagccaggtgagggggccctgggtctacacaggcttgaacccgacccctccgggcctcagtgggtccccaggatgggagccccaaaatgtagcccgggtggtgtcggcaagaaccctagaggctgggggcggtggctcacgcctgcgcctgtaatcccagcactttgggaggccgaggtgggcggatcacctgaggtcaggagttcgtgacaagaaccctctcactactaaaaatacaaaattagccacgcgtggtggcgcgcgcctgtaatcccagctactcaaggctgaggcaggagaatcacttgaacccgggaagtggaggttgccgtgagtcgagatcatgccattgcactccagcctgggtgataagagcgaaattctgtctcaaaaaacaaaaaaaacaaaaaaagaaccctgcaaaccctagaggcttctggaatcctgtttctgcctttgtcctcaatagaaccaacttgaaaagctggccacagcttccaaagggtcaggtttcttcctcctcaccctacccggaccttaggaccccaaggtgggggacacacaggtgaccccaggactctggccctctgaccygggttggggcgagcactctcctggctcctccccgcttcagccagagcgacctttacaccccaggtaccttatctccctgggagcggacagggatgcaaccaacgacgatggcgacctgccctccgacctcatcgacccggactacaaggagctggtggagctcttcaaagggaccacgatggactgagccagctytgcccgcccgcccccgcgcccagggccgcctccctggagaagccgcgcgtcgcccatgggccagcacgtgccccacccgtgggccaggggcggccggacccgtccctccacgaccccgccacccctcctaggcctggctttgtccccaggtgaattttttactgtgacactttttactttttcaataaacgtgactcccaggtgagggggcctgggtctacacacgtggtccctgtggtggtgtcctgattactgggctctggccgctcccagtggccggcggcgctcaccgttcgggccagggaggtccggagcttccgccacgagccccaaccccgcacgggaatcccggccgcccccgccctccgccagccgggcggtcacgtgagagcgcgctgcgcctgcgcctgtgcagcccgcggtggcgtcacttccggcggggcctcccagctggaagaggcggtggcggcgggtcggggcgaggtgaggcgggtgcggccgggcggcggggacggggcggggcggggcgggcgcggctggccccgccctggtgtcgccgcgcggccgcgggtagccctgcagggccgggcggggccgggcgcgggggagtggccgggcagccggggtccgagggaggggcccgcgttccccgcccggcacctgcaggagggcgcggccgcggggcgcctgggagcgcgcgtggggagggcgcggctcggactgagcgcctttcccgcccaggcaggggcaggtgccggggacccagcgccgccggacgctcgcagcgggccagccttctgccgccgtcggggctttggggctgacagagccccgctttcccggtctcctggagggaccgtgcctgaggatgcctccgattctcggagcgccgcgggcccggccgtccgcattctttttctgtccatttttcggccttgccctctttcccgtctccccgggcggtgatgctgggcctaacggggagaacggggcctccgcctgccttctaggcactcactgggcggtggttgtgaccgcgggggcgggagccatacggggcacgggctgtgcttctctccctcctgcccctgggtagccgtcgcaggaaggtggtctttcagctggatccccaaggatgagtaggatagttttgggcagagaagacagcttgaccaaaggccctgaggtgtaaacagggaccagtgagtggactttgggtgggatgtggcgagaacgtgtagagagggtgggaagtgggacgtgaaggaagagccaacagggctggatttggggcgagtcaggggaggttgtggtttgagtgggatcaggatggggaggagggcgcacacgctcaggctgttgctgccaccacccaggggagagggtgaggaggtggtgcagcgcttagaggctttccctgggcggtcttcaagggaccacgaggtgccagtgtggcagctgtgacagccgtatcctcgtgcgcctgcttgggcaatagatcattttctagcctcgttggctgaaaaagacacagaacacgaagagaaagtggagtcttagaaactttgaatctcagaaactccggaggagcatggtgactagcgatggcgtcactgattctaactctggaacctcactattgtcacgttgctggagtgttacctcatggcctgttcttaggcatgtggctgtgtgggggaaagaatttgggactgggaggccagagactggggttctgtcccctccccacctggaagtctctaaagcccttgggtcccctggaggaggaaggttctacatagttctacccaatgcgactcccctccctatctggagggagggccagtctctgagcaaagccacatgggtatcagtagggagtgggtctttcagggagtccagaaacctgctgtagggtgcaggcagagtggaggcagactttgggaggctcaggccagctgcagcattcgggctgagccccaaatgctgtggccccggaggccctgggaggggcaccgctgcttggtggcaggctccttcagcgctgaactggaagttctcagggtatctttctggtccagctgtggggatgtgggcaatgtgtgtaagggcccagcgtggtggctgccctgcccttagcccgacaagtgtttgctgtggctggtggcagtctcttctttcagtccccagtgcttttctgggcctccaccttcctaagagtgggctgactctacattccagtttacccagaagagttgtttcattcttgataatcaacagcatccctttcgttctttttttttttttttttttttgagggcagagagcagagatggggcccttttttgtttgtttgtttgttgtttgttttgagatagagtcttgctctgtctctgtttcccaagctggagtgcagtgacatggtctctgctcactgcaacctgcgcctcctgggtataaagcgattctcctgcctcagactcctgagaagctggaattacaggtgcataccaccatgcctggctaatttttttttttttttttgagagacagagtcttgctctgttgcccaggctggagtgcagtggcacaatctcggctcactgtaacctctgcttcctgggttcaagcgattctcctgccttagcttcccaagtagctgggactacaggcatgtgccaccacgcccagctaatttttgtatttttttttagtagagatggggtttcactgtatgttggccaggctggtctcgaactcctgacctcagatgatccttccaccttggcctcccaaagtgctgggattacaggcatgagccactgcgcctggcctaatttttgtattttttttttttagtagcaatggggttttgccatgttgcccaggctggtctcaaactcctgacctcctatgatctgcccacctcagcctcccagagtgccaggattacaggcgtgagtcaccgcacctggtcgagatggggctctttctatgttgcccaggccagtcttgaactcctgacctcccaaagtgctaggattaccaccacatctagcccctttcttttttctttttttgagatgaagtctcactcttgtcccccaagctggagtgcaatggcgtgatcttggctcactgcaacctctgcctcccgggttcaagcgattctcctgccgcagcctcctgagtagctgggattacaggcgactgccaccacgcctggctactttttgtatttttagtagagacggggtttcaccatgctggccaggctggtctcgaactcctgaccttaggtgatctgcccacctcagcctcccaacgtgctgggattacaggcgtgagccaccacgcctggccccagcccctttcattcttaacagcatccagttgaaccatacagcacatgcttgtcctgtccatcatcgtattggataaggagccacagagacctcactgagctgctggctttccatggctgtgcttccgtccctattggagcaggcgagcctacctgtgggctgcatcactttgaatgaggatgctgaggctcagaggagcttgcccggggccccagagcaggggaatacctgcagcccagtaggccaggccctgtaggctggacggccacggaagcaggcagtcacgtcctgcagaatgcacagacttgcaggtggcctgtgctctgtgtggctggtggcaggtagtcctgtggcaaaggctgttggggcaggagtggagcagcaggtgacacctggtaaaacaagttgggactggacagtgggcttgatggcagcagagggcctgggtgacaccctagtgctaagtgacttggggatagggtttcaggaagatcatgtagacatctgtgtccacctgtcctgatgctgggtgtctggaactggaggttgtcccagcactgggtggggtggggtggcgtgggatgtggaagactttgaggggaaggggagaaaacacctaaagaccatgtagcctgaggggctctggaagggtggtcctgggccaggagagtgtcatcgagggtcctcccatgtgagaccccagccattgtgagctgcgctatattttacagtacattgagaaataaaaaccaccattggttaaattctgacgtgttagcaattgtcaggcgcagcccagtttcaaagatgttaaaatatgaaaactatgaaagaaaactctcagaggcagtggggtgtggtgtagcgactgaggagtacggggccgtggccgggacatcggcatgctcggtcttgattctgacagaaagagggaaggaaaacgggaccgaggcatcgcctgaccctcccttactgctgtcaccctggtggtggcccaggtgggatgaaggcagggggccgggctggatggggtctcgagacctctgaagtggggctgtctctctgggctgaatggagcccctccctcccacccttcacctgtggtcggcctcggtcaggccgccactcccctttacctgggcagctgaggtgtcagtctcctgctggctcaggggctgccacctcaggtggccgtctgccgtgtgctgggtcttttccggctgcccccggcgcttctctgggcctgtgccattgtcccctgctcactctcacccactatggtcctgggtccctccacatccaccacctcagggaccccatgcatggatgttgtgcctcagggttccctctgcttagccagacaccagcctgctgcccaccaggcctgagctagggctgagctgcctgccagccacacttcctgccctcccccctcagctgtgtgcctcactatgctaggccgccccgctgaggttgttggaggccttattgtggctccatggtgacctcttggttcagagcttgcttgacctccagccctctccgtggatggctccttcctgccctcacaggcaccgtcctggccccggctccagttatgtccatgcctcggccctctgcagcttcctcccattccatgtgtcccagggcctgtctgtggcccctcaggtcctgctcttgtgcttggtgtccgtctctgcgtgggggctgtggtgccccctctggctgctgattcccttatgggaataggccaggtgtgcattgctacccttctgcggtggctcttccctttgggtaattacgagtgaaattctccagctgtccttgtacgcatcttgggtgtgtgtacctaggagcagaatggctgggtcataggttgtgcacagatacttgatttttaatggaaaattccttctgggtcagaattgggcacccagctccttggcagggccccaggaggcagtgaggctgaatgagctgcagaaccgtttattgtgcttccagggggacagcaggcccctggcctcttggaactgctggcacatccaggaaagcctggggctatgtgtgcagggtcggggggtgggggggcagtgtgaggccctgggggtccctaagctggaggaagaagtagggagaggtgggaagggctcttcgtgtctgggaagacttagaggacacagcctgtggtattgagggtgtgggtacatttcttttcctaacaagaggaggcaaacgagactccttgttgacttaaaaaactgtatgggtgcagctgggtgtggtagctcacacctgtaatctcagcactttgggaggccgaagcagatggatcacgaggtcaggagatcgagaccatcctgactaacacagtgaaaccccatctccactaaaaatagaaaaaattagctgggcgtggtggcgggcgcctatagtcccagcgactcgagaggctgaggcaggagaatggcgtcaacccgggaggcggagcttgcagtgagccaagatcgcgccactgcactccaccctggacgacagagcgagactccatctcaaaaaaaaaaaaaaaaaaaaaatgtatgggtgcacaataggtgtatatatttatggggttttaaatttatttacttagagacagagtctccctctgtcacccaggctggagtgcagtggtatgatcatggctcaccacagcctccacctcccaagctcaagcaatcctaccacctcagccatcactcctgccaaagtttttatatttttgtagaaatgggattttgccggccgggcgtggtggctcacgactgtaatcccagcactttgggaggcccaggtgggtggatcacaaggtcaggagatcgagaccatcctggctaacaggacgaaatcccgtctctactaataatacaaaaaattagctgggcgtggtggcgggcttctgtagtcccagccacttgggaggctgaggcgggagaatggcgtgaacccgggaggcggagcttgcagtgagccaagatggcgccactgcactccagcctgggcagcagagcgagactccatctcaaataaataaataaataaataaataaaagaaatgggattttgccatgttgcccaggctggttttgaactcttgggctcaagtgatctgccctctttagcctcccaaagtgttgggattacaggcctattttaataggccagcaaccgtacctggctttttttttttttcttttagacggagtcttgctctgtcgcccaagctggagtgcagtggcacgatctcggctcactgcaacctccgcctcccaggttcaagcacttctcctgcctcagcctcctgagtagctgggaccacaggtgcccaccaccacatccagctaatttttgtatttttagtagagacagggtttcaccatattggccaggctggtcttgaactcctgaccttgtgatccacccgcctcggcctcccaaagtgctgggattacaggcgtgagccaccacgcctggccttttttttttttttttttttgagatggagtcttgctctgtcgcccaggctggagtgcgttggcgcgatcttggctcactgcacctccacctcccgggttcaagcgattctcctgtttcagcctcccgagtagctgggattacgggtgcctgccaccacgcccaactaattttgtatttttagtagagacagggtttcaccatgttcgccaggctgctctcaaactcctgacctcagctgatccacccgcctctgcctcccaaagtgttgggattacaagcgtgagccaccgtgcctgggctttttttttttttttgacacagggtcttgctctgttgcctgggctggagtgcagtgccacgatcttggctccctgcagccttgacctcctgggctcaagcagtcctcccaccccagcctctgagtagctgggactacaagtgcatgctgccacaccaggtgtgttcatatgggtgtgtgccgcatgtgtgtgggcaggtgtgtacagacaggtgtgtgcgggcggttgtatgcatgtgtgtggcagatgtattcagctaaggtgtgtgcaggtaggtatgtgtgggcaggtgtgtgtgtgtgtgtgtgtgtgcacacaaggcaaagggagccccggaagggtagttgcttgggaggatgtggggcaatcagtgggatctggggcaggagtgacaaccgaacccagcagggggatcccaggccaaaggtgtggctgcataaaggccaagtggccactggaggcagaggatgcatggggagaagagccacgggagagggcaggctgggaggcaggtacccctaaagcagcagtcggtcagtggtgagagccagcagggggcgaggcagggggctggccagtctacctgttacctgagctctgcctttctctgtaacgggagcttcccagcaggcagcatgtccctgtgggaccctcaacccaaacaggcctttccctccgtgctctggtgttcgtgggctggagtccctggcaggaggactgggcagagagaccccagagtccaagaaaggagaggtgactttgtgagcaaactgggtgctgccgtgggtggggagcccctggccctttttggacctcactcctggcctgggatggggcacagagttccagggctgggagctggttttctgctctttgctggttttgcccttgagccgtgggattcttatcacgtggtgtttgagggctggaccattgacatgaggcggaatgagccagagaggactcgaagcctcagtgctcctggccctctgtgagggctgcagccgtgtgccctggagtatctgcagccttgggcctctgggtgggcaggggagttgcttgtgctcaaagccccctcctgggaatcctgggactcccctcccccagaacctggagttgccccctctggagcagggcaggctggagaccagccctgtcagcttccccaccttggggttgtgtgtcctcagctggagtggggacactgtccagcctgccagtgtgagcgtctgagcctcaaaatagactccatttttccagagccgtggattcccctgggctgggaggccataaacgggcggcagcccagggtcttggtcaccaggtcaggcccagcagcttcctccagggccaccccctctgcccaccaggggagctggagtttggttccatctccagggtactgatgtggctcatgctctagggaaccaggaagctggacctgggtaggtgccggggagctgggatcacctttaggaagctcatccccgttttacagaaaggaaatcaaggctcagcagaagccgtgtgcccagccctgcaccagggagagcagggtcagttagctgaggggctgcaggccctctgctgcagtgagaggcagctggacatcagagatgctgacggccccaccagcccacgtggggaggggctctggccacagtgctcccggtgctggggctgaggcctccacgtctgagcctgagacgtggaggatcaaggccgctgagcgggcttgatcgcttcaagttgtgtgtgtgtctggctcgtctggccagctctctgctacctcgtagggttgcctggagcccactggctgcctgtggctggaccccagcctgtgggggacaccctggtaggcagagggaccatgcactttgttcacatctgaagggaggaggcaggtgtgccctgcgcctccccctccttctgtgctggagagggtggccctgcgtcccatgcctgcgctggcttctgtttcagaggctgaggggatctggcggtggagcgctaggatcagacgcccccgcgatgaccaggtgggtctcaggcaggtgggctggtctccaccggggcgggttgtgggctcccaccctgctgtgtgccctgtctcatgcgccaggctcccccagctcccccgtctccagagtcgtgtacaacggcaagaggaccagcagcccccgctccccacccagcagcagcgagatcttcaccccagcccacgaggagaacgtccgcttcatttacgaaggtgggtgcgcctgccacacacagctcctgccctgtccttgacggagtcagctctgcccccagcccaggacccacgctccgaggaacctcctgcggcccctgcccctgcccctccagggcacagatagccccatcactgtgtccacagccttcagggcccaggcgggtaggggtggccgaggggaccttgtgtagagaggagacctggttctgatcatggggggagcccgggaggaggggctgggggtgggccatgccacagatagaggccgcactgggagccagtcatccatgctagcagcactggaggagtttgctggggaaagggaggggcctttgaagacagacaggcacgcatccagccatgaacgggcgtgttgcagaagtggccgggaggtggttgtctgggattaggggagtgtgccgtgtgctggggccggggaggtgcgtggatgaggtgggaaagatagaggcctagctgaggaggatgcgctgcctccgaggcgcagggaagcctggggtagggtcataggggtccctctgaccacagtcctggtcatcttgcggggaagggacaggcctgccagaggagcggggacggggtctgcaggtgagtgaggctggggtgggcagagggctgtgggggagcatggaggacacttctgagggagaagaggatctgggagggcaggagctgagggcaggcactctcgtgacgtggatgccaccccctggggcagggggccctgagcacaccactctctgcctctgcagcctggcagggtgtggagcgagacctgcgaggccaggtgccgggtggcgagcggggcctggtggaggagtatgtggagaaggtccctaaccccagcctgaagagtgagtgggggctgacctgggggcagggctgggccggcaggccgggcctcatgggcaggaggggcctgtgcccaccacctaccgcgttgtcccctggcagccttcaagcccatcgacctgagtgacctgaagcgccggagcacgcaggatgccaagaagtcctagagcgcccggtgcccctccccggcctccggaagatcagggtgcgaggtgtcggttccctcctgtcctgtggtcctgcccctgggatgggggtgccttgctccagcgggctgcagatcccagcactggcgtgactgacggctgaggcctgcctctccttcccaagcccccttccttcatccttgggggtctcaggctgcccccatcatgggggtctgggccctgcccaccctcctgccctcccccagccacctggctgcatttttgaagctgcctggcccccaggggccctgacctgacctctctcctctcccctcaccctcctgcccctggccactgcaggatcaggaggggagaagaaggagcctctgctgcctcccaggctgctgggactgggctggttttgtccttgaagtggtcaggatacaggacaagggcagccccaccccatccagcctgggctccccgcagacccttgctgctcccgtggcctggacacgctggggagcttctcacacctacccctaccgtccagcctggcctcttccctgaatcagcttcaagatggcaccagctctttgggcctaggatactgccgggccccccaagggggtccccagcaaccaggcctggcctcctggtgtctgcggtcacagtggcccctgggcaggggcacccaggctgaccctgaggtgctgctgctgggtctgtcttggctctggggtgtgctgggagggtcaccaggtcccttttccttcctgtgccctctgaaagctaagtgtctgtgtggctgtggagctcgagggtctgtgaataaaggcggcggcactgggcgtggcctcttggtggtctgtcaggcctctgcccctgcggcacacatgcacagccagctcccgggcagggctggaaaccccagatcatggcgaaggcttctcaagcccagaaattctcagtctaagccactgggcgtgctcaggtctcctagggcaggtggtggcagggagggcattctggagggagaggctgggctgcctgatatcactacccttgttctgccacaggggctgcccagggggccgcagaggtagtaggcaccaccctgaacccaccctctggggcactgtggcccctctaggagctggctcctcccctgtccagaagaagggggtgccgctgggcccaggagagagccacgtgcacttgaccttcaaacctgcaagctgccctggcaggccagacagggagctctattcctgttcctgttggaagcgaaaccagaatttattccaggaacacgctttcccagaagagtggccccacaggcgcctcctggtgggtgggctggtgcaggagatgctggcgcagggctggcctccccggggaggaggagcaggggagggtgttccagtaataaaccagcccagctgccgcctggcagccagtgtgcacagcagtacccagccccgagccaactccctgtaaacacacggccttacctggcccccatggggcctgtgagtccttcgaggagcgtttcgagtgcccaccaggctagggtgacccaggctgcctccccctgttgagccgatgcagcctggggaacaccaccacggggatgaggggcgggcggctcacagcggtcctcatgccatgtgccttccactcaccgagcctcttggggacaaggccctgccctgtgcaccttctgtacagtggtagctgcaagggccagcagaggtcctgcagtggggggcccactcaaacatggggttcccagattcccaggaggaggaggggtgggcttgagccctggccaggccattgctacaccgtggctgtgagcaggttggagtcagccttggtttcttcaggtggtgatgactacatcatgggtggcgcagtgcttggtgctgctacccccacgagtcaccgtgtgggtgcacttgacaaggtgctgagcctcacacagcaagcgcgaccctcagccttcggtggggagtctgggctctgcagtctggggcctggcacacggccagcctgcctcaatttacccctctgggttttctggtttttggtgtttttgtttgtttgtttgtttgtttttgagacggagtcttgctctgtcacccaggctggagtgcaatggtgtgagcttggcttactgcaacctccacctcctgggttcaagcgattctcctgcctcaacctcccgagtagctgagactacaggcgagcgccaccatgcccggctgactttttgtatttttagtagagacagggtttcaccgnnnnnnnnnnnnnnnnnnnnnnnnnnnnnnnnnnnnnnnnnnnnnnnnnnnnnnnnnnnnnnnnnnnnnnnnnnnnnnnnnnnnnnnnnnnnnnnnattacaggggtaagcctccgtgcccagcctttgggttcttttttttttttaagcaaatttattaaagaaaaggggccaggtgcggtggttcacgcctgtaattccagcactttgggaggctgaggcgggcggatcacaaggtcaggagtttgagaccaacctggccaatatggtgaaaccccatttctactaaaaatagaaaagttagagccgggtgcggtggttcacgcctgtgattccatcgctttgggaggctgaggcgggtggatcacaaggtcaggagattgagactatcctggctaacacggtgaaaccccgtctctactaaaaacataaaaattagctgggtgtggtggcaggcacctataatcccagttactcgggaagctgaggcaggagaatcacttgaacccgggaggcggaggttgcagtgagctgagattgcgccactgcactccgtcctgggcaacagagcaagactccgtctcaaaaaaaaaaaaaaaaaaaagaaaaagaaaaaaataaataaaagaatggctactctacaggcaaagcagtagtttatccctctgtacagagtgtgggctgtggtgatccaaaggcctctcccctgcatgggtgctgggacccctgtgtagcacacaggaggtgccgagggagctccttgtgttaagagatggacctgatttgggctcacctgggtcatcttacactgggccctggaatccgggccttgcctacctacagccggggggtggagctcccccaggtatggccccagcacctgggcctgccaccagaaaccttcaatttggagatctttctgccaagaacccttcagaggagggggccggcctggccaggcacatgctgggcaggagggtaggagtctgtggggagcgctgagcccacggtgttgctggaggccccaccccttcacccgatgcaccgcgtgggggatggggattggggtgaggagggggaggggacgcgggagagggggcctaacctacctgagggctggggaggtgcaccaccgggaccggacctctgaccctgaagcaaacttgccctcccatcccctcttcggtggaccacccagtgaggtcagctctgcaggggccacagggtggtcttaccccagccgttcgcctaatggtgtgagaactcactgtagtcacaaagcggggtctctactttcagcttgaggagcacataaagggctgctagagtgggcacctctcccctgggctgcgggagctgaccgtggggcccgatcccagagggttgcggtcctcccaccccagcctgtccttcagccctgctgccactgccttgtccatgcagggcaccagggccctccgaccctcacccaatcctggaggctgctggactaagcagctggagacactcccctttctgcagtgagggcgacttggggaaatgaggcaactgcaactgttgcgtgttgtaccgttggtgtgcatacacacatcacaatctgctgtgtactgttggtgtgcacacacatcactatctgctgtgtagtgttggtgtgcacgcgcatgtcactatctgctgtgtactgttggtgtgcacacacatgtcactacctgctgtgtagtgttggcgtgcacgcgcatgtcactatctgctgtgtagtgttggtgtgcacacacatcactatctgctgtgtagtgttggcgtgcacacatatgtcactatctgctgtgtactgttggcgtgcacacacaagtcactatctgccgtgtagtgttggcgtgcacacacaagtcactatctgccgtgtagtgttggcgtgcacacacaagtcactatctgccgtgtagtgttggcgtgcacacacaagtcactatctgccgtgtagtgttggcgtgcacacacaagtcactatctgccgtgtagtgttggcgtgcacacacaagtcactatctgccgtgtagtgttggcgtgcacacacaagtcactatctgccgtgtagtgttggcgtgcacacacaagtcactatctgccgtgtagtgttggcgtgcacacacaagtcactatctgccgtgtagtgttggcgtgcacacacaagtcactatctgccgtgtagtgttggcgtgcacacacaagtcactatgctgtgtagtggcgtgcacacacaagtcactatctgctgtgtagtgttggcgtgcacgcacatgtcactatctgctgtgtagtgttggcgtgcacgcacaagtcactatctgctgtgtagtgttggcgtgcacgcatatgtcactatctgctgggtactgttggtgtgcacgcacgtgtcactatctgctgtgtagtgttggcgcgcacgcacaagtcactatctgctgtgtagtgttggcgtgcacacatatgtcactatctgctgtgtactgttggtgtgcacgcacacatgtcactctggcaactccatggggcaggttttagtatcccaatttacaagtgaggaaacagtgacctctttcaggggggttaagctcttatgaaaattgtaattaatacttattgagcatgaacaatttcctaatagccgatatacccagctcccatttcccaaatgactaaattaataggttcctggtgggttgctggcagcatgggaaggcggcgcccatgtgtcccgagcctccatccgtaacatgcccctctttttccaccattcgtgtaaggacccctggcgtttgacagtcgtgtaccccacattctgcctttggccagctgcatctctgtggtgtcaacagacccctgtttcccctgtacttctgtaaaatgaggtgtggtgcagaggcctcatcggattcataggagacttcgggtgtcaaagcatctggctgctgtgtgggaatgggttgcagggtccggggtagcagcaggggtcctgttaggaggcttctgcagtggacagtgggaggaagaagctggggacagggtgagcagctcggtgtggacatccagctgtacatgccgagctgatagctgggtctaaagcgtggattcagcagagccccaggtcgggggagatagatgaagagttagctgagcactgctggtttttaaagattgatcaagaagaaatgagggtggtgcctggttcctggacacaacagggagagaaagaagaaaaaggaacagtggagggcagggtcagagaaagagcaggcaggggaggacccggggctgagtgagtgcagggggaggacccggggctgagtgagtgcaggggaggacccggggctgagtgagtgcagggggaggaccccgggctgagtgagtgcagggtgtctggggataggctgagccagctcacgtagtggacctgcagccctagccatctcccacccaccttgcctagagatgaccactttgtttttttgttttgttttgttttgtttgaggcggagtctcactctgttgcccaagctggagtgcagtggcgcgatctcggctcactgcaagctgcgcctcctgggttcacgccattctcctgcctcagcctcccgagtagctgggactacaggcgcccaccaccacgcctggctaatttttagtagagatggggtttctccttgttagccaggatggtctcaaactcctggccttgtgatccgcccgcctcagcctcccagagtgctgggatcacaggcgtgagccaccgcgcccggccccgaggtgaccactttgaactcttcacctcattctttgcatttttaaattttgctctgtatttttatttctaacgtgaattattcttgatttttcccattttgttctctcccctacccccagtacatacgtgatattcccgtccaccaccctccctagatcttttttctcccatgattctggttgcatcagtgttggtgtttacattatgatgtctgtgtttgtattcagaactgagtcatggtaaattctgcttgttttgttcttttctgcccaaatttttcttttctttggaattattaattgccttcttttttcatttgcttggttttttctttctttttttttttttttgagacggagtcttgctctgtcacccagggtggagtgcaatggcaccatcttggctcacagcagcctccgcctcccaggttcaagcgattctcctgcctcaggctcccaagtagctgggactacaggcgcccgccaccacgcccggctaatttttgtattttcagtagagacgaggtttcaccatgttggccaggctggtctcgaactcctgacctcaggtgattcgcccgccttggccccccaaagtgctgggattacaggcatgagccactgcacccagcctcatttgtttagttttctatgtactagtcactaatcaagtcctgaactctctcctctaaatattagtgcactcaatccctttcatccccttgagggtgtctctgctgagccttctgtctggctcaaggtcccctattcctgtgacgcacttctgactctccta

SEQ ID NO: 96794 - DNA, 13069 bp, Homo sapiens
ttctaggtaacactctggtgaacaatactggatatattagtaactgcacattagagtgttaatagttcatctcgaagcatgcttattgaatatttgttataggaaaacaaaaaagaacttctttatatttattttccagtcctaggggaaaagaatatgttataattgttggcattttgtgatacacactcacattctttgtggtcagaatcagaggtaatctttatttcaggtgctattatatctcacagaatttttcaatatcttcctgggctgtccctctgtctcctgtttctacaactttacacctgttttctcctctcctgcagggttatttcaaatgccactaaatataatagctcttctatcaccagtgactgtattttctggaggactaaattcctaatcttaaagtaatgacacatttcatgatgaagtgtgacctgtctttcctcaatcttagcaccaccaccaacccactgcctgctgccttgcacaccccacatatcacactctgtgactgtacttagaataacacttcatttcatgcccatctctttgctgtcctcttttgtgcacattttaaaaatctagaatgctctttttcattagtccaactggaaatcttgtattaagttttgcagtctgaagtcacaccaccatatagccttcagttacatctccaacacaagtacctgttttttcctctgaaatctgaaaagtaatagcaaattagttcagtgtgttatctagaaaacactgtcactttcagagcctttcattgtgcatctcattttattcctatgaataattttgctaaaattcatccaatcctaggtcatccaaaaaccagagcttttataactcatggtggagccaatggcatctatgaggcaatctaccatgggatccctatggtgggcattccattgttttttgatcaacctgataatattgctcacatgaaggccaagggagcagctgttagagtggacttcaacacaatgtcgagtacagacctgctgaatgcactgaagacagtaattaatgatccttcgtgagtagaacaatatttttcactagatggtattaatagatagcttttcttgtcagtagtgagcatgagtttcatcctttttataagagagtgattttgaaagaatttaaatgatttaaccaatccgaaatctgcttttactttttatctgttatttaaaaattgtatttgaaccccatacatctaatgagtaaccagttagtgaaacagttttctaaataaaaataattttaaaatgatatagataatataaaaaaatacatttcttaaaaatttgacataatgaatccatagtagaaaggaagaataatcttgaaataatataataaaatgttttaattaaatatctaaaatgtctcagaatataactattttcttgcagaaaaattaatttttattattatctttattgtaacagacttgaaaatgagatttaattttgatagcataaaacccacctatttatggcaaaaattccaaatatttttactatgtttacagagtcatgaagtcatcaccagtgtataagtttggaacatttttatcaacgcaaaagaaactgcagtgacaccaaaatcacctcccatgactgcttagtcatagtctaacaccaatttgttttctttctctatagattattctctatagatgtttcatataaatggaatcatacagtctagggtactgtgtaaatgacatttcacctagcctaatttttttttatggtttttagtttaattcatgtcgttgtgtgttttaatatttaatttcttttacacttgtataatattttttaatatagatacgtcataatttagttgttcatttatcagttcattggcctttgtgtaaggagggtatcatctaaagaaatactctaaaaatactttatcacaaagacaatagaaggataaagaatgatcaaaacacctttaaagaagatgggaaataattgaatagaaacacaaaccaacttggacaaatagaaaagaaatataaaacaaagtggtagatttaaatgtgattatacaaatactttcactcaacctaaacagacttttttaaaaaaacaagcaaataatgagtaaggacataaaacgtttgaagaacacaattaacaaatggaatcttataatgtaaaatgatatacacacatgtacatatacaatacacatatatgtatcgtatatatcaactggaagacacattttcctagagcatgttgaatagttaatagtcatttgaagtggcatgtggtgggaaataaatcaagacttaggaaatataaaaagattcaatatcataaagactatatgatccagccatagtggaagtaagggaggttataaatactattactaaaatatctttaaattttggaaattaacaaaatacacttcaaatatttaaagtcaagaagtaaatcataattatgcatgcactgttatctcagcaattctactctcaattatatacccaacagatatgtataaatatataaatctaatggtatatagaagagtggtcatgacagaattatcaacagtgtccaaaaagcgttagcaacagaaatatctattcaacataaaatgaagacatagtttgtgctttatcaatcaacaaaatactacacagcaatggaattacccaagaacggttacactaaaaaaaatagacactaaggagtacatattatataattcaattacataaacaagcaaagctagtgctgctattcaaagtccggttattctttagttggtggacaaaagtggtgacaaaatggttcagaaaaagagagctattctaggcaggttgtgatatcctgtaccatgaactgaacaataggtaaattggtatttttgcctcaagataatgttcaagatgatcttccatttttgaactattcacttagtgtacgtatatttatcttttgtattttgtatttaaatatatattttatgagatatataaatcattttaaaaattctaggaatcagatagaaaataagcacagtaaacagagaaaatcctagaggttccatcagattgtggccagtaaaagcctctcttagaggtaacacttagagggaagccacaaaaagggagagaagcatgccttgggtatagcaagaaagaatactccaagagcgggagagaagggataaaatgtgtaaagtgctaagatgagaacacctttggaagcttaaagaaaaatagtaggccaatctagaagacagtgtgcaggtaaaagtgttagaaaaagaccttgccagtgtctaacaatgtagggttctgtagaccaaataacagagttggattttattcttaaaataatgagaagccaggcaaaaatcttaatcaggggagtgccataatctcactttagttgcaaaacatcattctggctacagggtgggaaacagtaggagacaaaagagtaatctagaagccaagtgactagctatgaggcatgtcactcaccatgataaaattcctttttaggaacttagagatgttaattctcagattgcattttcacatctttcttacagcacttaaaatggctcatgatgttgagcacgttctaatatgcctgttttagaactaatagtgtaatgtggaatgtgttcataatacaaaggataaatgcttaaggaatgaatatcttattttccatgatgtgattatttcactttgtatcaaaacatctcatataccccataaacatatgcacttaatatggacccacaaaaacttaaaattaaaaaattaaaaacaaattaaaaatgcctgatactttctctgcttgaaaaaaataactttctcacctgactttccttttctactttaaaaatatttgtcaatgagaaaagtccaatttaaaagccaaactttgtatgatgactcaaattaaaatacataaattctatatcaattctttgacatttactttgaattatttgacactttaaaagcctttcatagacttgatatctacaggcaaattaacttactttcagtgtcggtatctttatttttatccttcagatataaagagaatattatgaaattatcaagaattcaacatgatcaaccagtgaagcccctggatcgagcagtcttctggattgaatttgtcatgcgccacaaaggagccaaacatcttcgagttgcagcccacaacctcacctggttccagtaccactctttggatgtgattgggttcctgctggcttgtgtggcaaccgtgctatttatcatcacaaagtgttgtctgttttgtttctggaagtttgctagaaaaggaaagaagggaaaaagggattagttatatctgagatttgaagctggaaaacctgatagataggaatacttcagttgattccagcaataaatattgtgatgcaagatttctttcttcctgtgacaaaaaaaaatcctttcgaagtctaccttgtcaagtaaaaatttgtttttcagagatttaccacccagttaatggttagaaatattctgtggcaatgaagaaaacactaggggaaataaaaaataatataaagccatatgagcttgtattgaaatttgttgcacttatattgaaatgtgatcatggctcacttcagcctcaacttactaagctcaagaggttctctcacctcagccccccaagtagctgggaccataggtgcatgtcaccatgtccaactaattttttattttttgtagtgatgagatctcattgtgttctccatgctgatttcaaactcctgggctcaaacaatcctcccattttagcatcccaaagggatgagattacaggtatgtaccaccataactttacaaaatgagatttttatataagaatgattcaaatgttcagggatgaaagagtcactaacataaaagaagaatgggatgaggtgagaaggatgaatacaaaaataattagatattcttgaaatcagaaatgtgctccctaattatatgaaatgttgtttgattacataaaataaagtggaaatgaatgattgactgaacagcccacaagaagaatcacttaatgctctgaaaattaccagtaaactgattaaaatctaaaattgctttctgttaaagctttactgattagtttttcttccaaagctctcttgtttctagttgttttcttggtcttaactacccattatatgctttgttaaagtgtttatgccctgattcaatgtgattatctcaatttttatttcattctgtcctaactcttgcaacctgcatgtcctctttattattgatcaatccaactgcaaagttcaccttacctgactaaggattattcattaagttttacttgtttatctgacatttattattttgtctctttgctagtcactctgagccatggtcatgatgacttaggattctggatctcttatgaataacaaatttatccttaataaagtctctatactaaagaagaatctaatgaaaaatatcacttgataaaatgagtgcagtacgtgaacaaatttctgactggatcataaacccaaaaagtgattaatcaatttattatttagggactaacaatgaaatcaattatatatcattatataatttgaattggtaaaaattaatatttatcataggtaaagcacaaaataactggcgactccagtgctggtttgttgggagtatgaatagagtggtgataggtgaagggcacccatgggcccagcacaacaagaatccctctaaccaggtccgagctagcaactactgaaatcaaaaatccaacctactagtatctcaatttttaatatatatttggacattagacaagtgaccaccagtggaactgtggactcagtggctcaaatctaagctcacctttgtctgaacctctatatggcccccaactttcaaaaaagaaagtcatgcctcctactcatccaaactttaccaagattcagtgtcttagggtacaacttaaaaataataacaaatgagaaatttgaaattttatgcctcaccagttttcaatttatcgtccctcatatcctaatacagctttatgatactgaatcaggatcctgtaagcattcctcctttgccagctagttgaaagttaagcttcatcaatagaggacactcgagtgatggtgaggtgcttgatgcaggaaggtgcatcccttccaagactcacactttagttattcagtaatgtttatcattaatattggagtttaagaatatgaatgttaaagaatatatttaagaatactaaagaatatactttaagaaggcaagaggaaaacttctaatagcacatttgttttaccttttattaaatattgcattctgcatagaaattaattcagaaaactcctacataaaccatttatatgagtcttttgtaatcactgaaagaaatagactgttgacagtcaccttttaaaagggtgtataccattcaactcttaggtataccatttattattttgtttcctgcaaactcaaagcatctaggagtgagattacaaaaataacaacaacaacaaaaaagcagtgttggctaatttgtcagcatatggaagttaaatttcttacagacacacaacttctgtgtaaatgtaaatcacttggccattctagctctattatcaaatttatagtttcccagagacaaacattgctttggcttttgtctggttttggatagttggttgtcttttctcttcatgcttccttatctcctttatttcatttatttttaattaaaaaacaaagagacaggaattacctatatttcattgttgaaggttaaattttgtttgtatttgtaccttagttccacacttttttctttctggaaacgtayatgataaacatatgcttgaaaacaaaggattacatggatattctgaactcccaaaaagagaatctcatgactaagccaatttcacatttctaattagcatacttgctttcattgagtgttttgaaatttaactaaacataaaattaaaaaaaaaaaaacctctaggctagtgtatatatagcactaactaaagagaggaaaactagaattacagtaataacaaaattaattgaatatcataaagaattacatgcaggttgttagactataatattaaaatcataattaccttttaactataggaaaactctagtttattagaaagactacataaatctatgcttctacttttatgttcaaatacactgaatagagttcctatacaatcaaatacgtggagaatactattgagcatgaatcttctctttcttatatcattccccaatttttatgttcatttgagctaacgtatttaaaatgtttcctttggagtcatcagaatatgtctcaagatttcaaatcctgcaatgtggaatagggacttaatgcactatttttattttattattaacaaatgacaagcaagggatatgttactaaagcaatagaaaagatcactaggcaaataataagttgtgtccacatacacaaccataatgctttccaaattgttatgtaaatctaatgcctgttatgcaaattgaaaaatgagattcaaattccaaatggaaagccatactttctccattgtgtgaatagcttcttataaggattggaggttctactgactttttgtggaatctgagccaggcctgaagtgataagatcaaccttttcttctgtaaggttttgcacaactgactccagagaaaacacaacaacaccatcctcatcagagctctggacaaattcttccatttcctacagaggaaaaactttcttcattataaagatgcaatgccacatagaataatatagtttatgtatacttctaaaataaaattttgaagttgacatatatatagttatatcatccctattttctgaggtgcattttagaatagaaatgttcaagtttgtgttagaaacatatggcttcagtacataataattatttactagaaaaagcacacaaccaaataattataaagaacatttaagtgagaaatgtgcagctcatttaatatttaatagacatcaaattctaaaaacataatggtttgcaaactcataaaactatttcaacaatatcaagtgtcaatttgctggcattttgtgatgtcaacaaaataataaaattttaaaaaccccacatcaattcccccacaaaagtacaactagtagctatccaaatacacaaatgtcactctgaattcaccagatctcaagagagaaggagaaaaccccaagactcacggacatgaaaaacttatgattggtaagatgaataattattttggactgtaccaccccccttccacacaccaaaatgataccactgtgagagaatttccttttacctgcggttactgaaatgggaagagggaatttcaagtggacatatattctatgcataatgatatgcatatctggtcaagaaaagcaaaactacgtaacacacacacacacacacacacacacacacacacacacacatattctatgttccaaagaagctgagattacaggagtgggccaccacacccagctactttttgtatttttagtagagatggagtttcgccatgttggccaggctggtgttgaactcataacctcaagtgatcctcccgccttggcctcccaaagtgctgaaattacaggcatgagccacgatgcctggcccctatctaaccctattcttgaaaggttttcccattctcattaaggaaaatgatagtgccattaggaaggcaaagatagtaggtggagaaggagaacaagaaaaagaatgactagtagtacactcatgataattactgataatagctgttattagcttgcagaaagaagatttgaatccaagtcaatagttgtgaaacctgttctctaattctttattacataaatcaattgttactttacccctaattgcttgcttttcaattgaatatgagtttcttttaaaatttctgtatattttaaaagaataagatatttggcaaaaagtaccaagtgttttaaaaatgcattggagtcataatatgttatataaaagcatgcagagaaaacaataaatcaagatgtatatattcaatatttatggaggatattcataatataaacattggaagtaatccaaacatcttaaattaaggaatacttatactctgtgtatgtcataccatcacaatcattttatcaaacaaatattgttatttaattacactggcacccataatacaagtttagctggaaactgaggatctaaatgacaaatatagcaaaatgtcaacttatttaaagatgaaaaggtacatgcaataatattaaaattttcttaataaatgtcacatatgtacattatattatataaataaaataaaaaccataatgaacatataccatttttacattggtaatgcctctgggacagaaattataggagcattttattttctttttaaaacttttcatatgtttataaaatttcttgcattgatcttttttttttgaaatggggtcttgctctgtcacccatgtgggagtgccgtgcacgatcttggctcactgcaacttccacctcccacgttcaacagattctcctgtcttagcctcccgagtatctgggattacaggaactcaccaccacacgtggctattttttttttttttttgtattgttagtagagatgggttttcaccatattggctaggctggtcttgaaatcctgacctcaggtgatccacccacctcggcctcccaaagtgcaaggattataggtgttagccaccgtgctcggctcttgcattgatcttgtattacttttgtaaagttttcacagaatgggaaaaaaatagcccacatcagtgatgaatctgtaaacagaggatatattattttaacactgggtagatgaagaaggctctgggcatcaggccagtgagacaaaacactgaatacaagttacattaaatgtggctacaagttactgcaatcacatgcaatacctgaatataccatgtattacctggaatagtactacaatgactctcgtgttgacattgaggtcttaagattaaaaatcatattttaaaaaatactcagcaatttgtggtctgcacagtcaatattttctttcttcatttgtaaggaacacttaagaaaaagttttaccccaatcattacatttgaaaatatttaaatttaaaaattggcatagactgggaaccacaagtcagaataattgtcaatcaattccaggcaagcacatcttcaccaagagttgaatataatgtgagaaagctactcaagacagttaccagaactcctctggagaaaggcctggaagcctctcccactaaggtgcaagcactccctgtgagacatagtaaagggatgatgagaattcctcacacccagttacaaatagcacatcaatttagctgtgtgatttcagggcaaaatgtgtcctacctaaaccttgacctgagaaatatgatcattcagctatgtaaccatttactgtataattctgtattacaaatgggagtctctggcccatttcacagaaattccaactacaataccaaacacctgaatgtcagtgattcttaatcaccagcttttaataacgattttttttggtaaaaatactggaaatttctgacaaactttaagtgaagtatgagggatatagtccaatatgaaatttgatggtgtgtgtaaacaggaaattcaatgaaaaatggataataattataaaaaatgacaaaagttattgatgtttaagaaaacaaaaatgaggtcaataaatcattatcctacaaaatatttgcaacctataaaaacctgagaaatctattcttgaagaagtataatgtaaattaatcttttcaaataaatttaaatatatcatttgaaactgaagttctacatctagaaatctgtcatgcagaaatccttgcacgtaagcacatgtatgaacaggatgtttcctccagcacttaaatggctataagtcaatatcttcaagatatttctgggatagtatttatttcctctatgtggggcccatttgtgaacatctattttatatttaaacatctataaataaatatatttaaaagttttaaaaaatattagcagttatagaaatctaaattcacaaaattttagtaatttttctgatttctatgtcaatatacaataaatattacaataacttagtgactgctgctgcgtacttcaacaggttttatatatggtgattttgagatataattcaaatactttgacaatacttctgtcaagtcatattgtttttctttgaactttggcaaaccttgtggctgtttcaacaaagagaatgcagtagaagtgatatagcttaactttcaaggctctcttagaaaagcatacattccttctttgtctctttgtcttgtctctgtctcttttctatttctccatctccgtctctttctatcttgctactacccatacctcctcaactaaatgtaaagcttggtgccatatctgaagtccctatgataaataacattttgtggaaaaacaaaataaatgatatacatatatatcacatagactaagaaatcctgatagttttagaaactatgtggaaaaaacacataattgttccaagccaacgcctaaactgtaagagataattaaatattgtagttttatggcttaaatttaagggcaatttgttattcggtggtaccaatatttctatatattttacatttgtaataaattacttttaatatatagctacataaatgggaaaatgtagatgttatattttaaaactaactgtaacccagatagaagagtcagcataacatggtggttaagagtttccactttggacccaaagatggcttgattcaagtcactgccaaatcccactacaaaatgatgtgggattgggcacattaattaacctttcaatgcctcagctccctcatcaatgaaatgataaggattatgatgacattatcaacctcatgaagttgttaagagaataaattcattaatatggcaaagcaccaaatacagtgacatatatagcaaaatataatgtaaactaattatcataattattagacagagaaaaatttccacaataatgttattgttcaaataattgtatgaatttatttttaaacatgacacgtttctaatataaatttttaaaaacagcatttactatttcaaatatgtggaaattaaatttatcatatcaaccaagtgctggcaaacaatggcctctgggccaaatctggtcaaatctgaccatctttctttttcaattaaggtagaaattataaacataaaaatcaccatgttaaccacttaatttttgcaatttgttggcatttaatacatatgcaatgctgtgccactatcaccagtatctacatctagagcattttctttattacaaaaggaaactctaaatccattagacagtcatgtcacattccccattctccagcttctgcagcttgacattatgtattttcatcattctatagcccattaggtaatgcaaagcatataaaataaaatagaatgaaataaaatataaagaagtttctaacatcaaccaagagtgttgcttctttatttcatatatggtatttgttcataattaacaattatctgatttatagaaattctactttaattacataattaatattttctcaaatatacacagaagtgttgtgatatatactgttgtagtttctttctcatttggtattgaagtatctttcttgagactggccatagccgagatagccactccttaggagagtgctgaccagaagagaggagaagtgggttcaggtttatgtgttaggtaagacacattgaggaagtaaaaccaaaatgcatcaaataaaagaaatttgttccaggtccaggggggttgggttgatga

SEQ ID NO: 96795 - DNA, 13328 bp, Homo sapiens
  misc_feature (1)...(13328): n = A,T,C or G
aatcatcgtggaaacggatgctccctatttcctccctcgccaggtaagggggtcttcaggctgagtggaggcaccggagggagagggtggggaggtgggtggtcacccttacaaggttggcagggccagagccccagtgacttccaggtcccatcctgggctgtgtagatgcctccttgctgttactctgcagaaccaaaagtctagggggctgagaagctgaagggtaaccactctcttccaggcagtgcaaagccctaccctgtagagggtagtccaaggaagcgtgggaccctgctcacccagagcccccatgactaggactctccctgcacctgcaggtaaaggggtctctacagggcagccccaaagaggtccttgctggggaagggacagggagggagttctagattatgactgtgcacacatggcacaatgatgttatgaccacttgatgtcttccaggttcccaaaagcctttgccagtatgcccacccgggcctggccttgcatacggtccgagagattgccagagtcaaagatcagccactctccctcaccttggctgccttgcgtgagaacaccagtcgcctctacagtctttaagcagagaaggtacagtcctcgggagtctcctagaaaaggtcgtaaaactcacattctgtattttttaaaaaccaggacaagtcttttgttgcattttgttaatgtaaagaatataaacatagtatgagcattaagcctgatttgttttgagtgacatggtttggaaccttcttctttttctcttccaccctccagggcgaccagcagcctgacagaacacaggctggcttgaagtctgtgtctcaggtcgaggatgtgtttagagagctgattggaacacagaaaaccaggacaggatgttttcctccaagcgggtcataaggcttcagcttctgggtggtgggtggggtggggtgggcatggaatgaggggtatggggactgcctgtaatagcactgggattttgcctcccagccaaaatgctccagggtaggcagcaaagaagaaagagtgcgatatgagggtacagtgagtttggcagtccaaattctgttctctgcagcctgtttttgagtagtttgtgaataaagtcacccgcctacttgtctaagcacatgtgggtgtgtaactcagttcctggttctcggttctaaaaacagacttccaactgggaaactttttgggggaaattaactggacacctatctcggaggtttattttcttgcaaccagtgaagtcgtcctcctcccttccctggataactcttcagtttgactgtcactgttctggtgtcaactccagcgtcggcacaggcagaaggacttcagctgctggtctcattggttccactgccattgatatgggggggtgcagaggagcactcattgtccatgatggagatccaggacagactgggggactccgggaagaggctttcttggggaagaggaccccaaaggaggtacttcctcctcactgatgccctcagggctgctgtgtgggtgtgttaagctgataaggttcagtttgcggcggaaactacctgctagtcttgtgtcaggggctgccagcctccttttgtttcacttttgcccccttcttgggaacatttgaccaaaaataatcctcatttcatcttgtgtacagtcctttgtgtaccccgcccaggttgagaggtgaatcagcgtaattctccgaagctctgctgggcagctcagccatgttacattgtctatgcagaataagcaggcctggtgtctgcaaatgtaccagtccttctcccgcatctcctgggtgcccccttggctttgcctctcctgtgtcctgtctttctgcgttttagaagtgagagcctctccttcaccttttgagcaactgagtcatctcaagtcctgagctctgctctgccgcctgctggtgccttgtaaaggtatactcgttacaggccctagaggttctaatggtccagggttaagtgagaggagactgtactttgtttcaaaggatccttcaccctgatctgcagtgaggtggatagatcacctggagtccctcgtctgtggtcttggaggcttaaattgtaaaatacatcccttatggaatcctaaattcctctaggtgtttttggaaggcgcatttgagccttgtgagctaaaatggaatggatttaatatttcctatctggcatttccatcttgcccctggtacacaagtcactggcctggaactcagccttgattcactgtccgtcttcacggattagctgtgctgttatgttgtctgtgctgcagattggcccatgtgggaagtcgggggggacctgatttcctgcttggaagacttgggggactgccgagcatatcaaagtgtttatagtcaccaagtgaactgcagcacaaccatctcctctccagcaagccctgaagtcagtagtgcctgcaggtgaaaccaaccagccctgtgttagaggaggaaaagcggagatgacatggaagtctccaagcctgtgccatccacctgccaaggaaaagcacaaggtgctatctacttttctctctaggatttagattatcatttatgtgctgttgcacagtgaaacctcacctgtgtgggcgtgaaagctgattggcattgtttttgattcagctttttggatggctaattgttttcactgtgctgtgggaatgcctctgtattttttcccctctttggccatctttttctgaaaataaagtgatggatcctctagccaacccagtctctccgtgtttgtatagacttacctgagtgatgcagtggtttagtctggttgttggccagcattgtaacccaagaatccaggtagctggagactttttttctttcttttttttttttttttgagaaggagtcttgctcttttgcccaggccagactgcagtggcactatctcggctcactgcaagctccgcctcctgggttcacgccattctcatgcctcagcctcccaagtagctgggattacaggtgcctgccaccgtgcccggctaattttttgtatttttagtagagacggggtttcaccgtgttaaccaagatggtctcgatctcctgacctcgtgatccacctgcctcggcctcccaaagtgctaggattacaggcgtgagccaccgcgcccggccagctggagactttcttgagtatctatgtggctctctgtaaaattaaactgcatataagaattcttaaagttcggccgggcatggtggctcacttctgtaatcccagcactttgggaggccagggcggacagatcacttgaggttaggagttcgagaccaagctggccaacatggtgaaaccctatttctactaaaaatacaaaaactagctgggtggggtggcacgcgcctgtagtcccagctattcgggaggcttaagctgaagaatcacttgaacccgggaggtggaggttgcagtgagccaagatcgcagcactgtaccccagcctgggtgacagagcgagactctgtctttcccctccccccgcctccccccagaaaagaattcttaaagttctacagccttagagtgttaagtaattttactgtctgggaactcagatgcactgcttctttctgacctatgtaggtactttcttttcttttttttttgttttttttttgtttccagctcaaggctgtaggaggaagaaaaatctagtccctgggggtactgatgaatcagttggatggtgggcgttggactgtgaattcctgatgcctctgggtaaactctggaggaaattctgtttcattacttgcactcagccctcctattttgtactaaggtattcttgaatacaagtgcaccggccaaaaaagtaaacttacgcataaaaagaaaggctctcttccttccaagaatgctgaacacctttgaagtctctgttgctgcctcatcttttagatacaatcattgattatgtatttttggcatcgtcctgaactttgtttcatttccttcacagttgaatgtgcagttggctttgtccactcagtgatggtccttgtgactgttcttggcttttctgttgtttttccatctttctataggaagcttgagaccgatactcatcgtttgctttcagcaccttaattttgctttgttcatttttgtaaagtaagggcaaatggccaccggaatgtacagtgattaaagaagcaaactctgtcaaagatggtgattagtggccagccagtccctctcaggatcactgtattaaaaagtgctcatttgccagtgacatttttttttggttttggtttttttttttttttttttttttgagactgagtgtcactctgtcgcccaggctggaatgcagtggcctgatctcagctcactgcaacctccacctcccaggttcaagtgattctcgtgcctcagccttctgagtagctgggactacaggcgcccaataccatgactggctaatttttttttttttaaattttaagtagagatgagattttgccatgttggcctgtttggccttatactcctcatctcaggtgatccacctgcctcggccccccaaatgccagtgacatttgtaggtggattcagattaaggtgggtagcttagttgaggcgtctcaacccttttctgtgcactctctcaagatgatttctgaacacacaactataagtgcatgagaacttaaatacgtgtgctcttatgctaattatacacaaagtaaaagttttttcacaaggagaatttttttctccagcaaatagctcgctcaccctaggggtacatacaccccactttagagaccctcaagttacagtggtatcattaaacgatccataaaggagtgggtttaagaaagctgatacaggaacatgtttgaaataatacattttctcaagggtgtcctccaaccattttctttgataaattatatttctgcccattgttgacttgaaattgtcctcacccctctaccaagttcacccagtgtattctgaaggaaaatgaatgaatatggaaacctctctcatcctaggcagtagagcgagggaagctgcactggctgagaggctgtggaaccggatgaaaaagcagcccctgagtcctgtggcgttggctgtgagtcggccacgtgcttgctgtgtgctttaggaaagttacttaatttctctgagctttagttttctccctcataagtaggcttgctgtgaaaatgaagtgaaatcacattaatctgcatgagcatttaacacggtgcctggtgtacatcaggggtgtgacagtgagtgctggctgctgtagtaattgaatgcttagctacgtgccgggccctttgccagctacagctcatgtgagacctcatgttcagtcttggcagtaacccagcaaggtaggcattttacatgtgaggagcctgagaaattcagtcttggcctggatcacagagctggtatccaaattcaggtccgaggccaaagcccagatctttgcactacaccttgttgcctggcacaggtgagagtgcccagcccatagtgggtgcgcaatatctgtttctatttgaatgacccaggcaggcggttaataatgcttgtgatttctttgagagagaagtaagttcttgtctttggtgggggaagcatcaggtgaccagcatttgtccagagcctggtacccatcctctcccaagcccaatcagtggtgctttctcaaaaagaaaccatctcctgaccactttggccatattgggcctttgctcctcttctgtagctattgataagagggctgtgggcagttagtgataatcaaggtcgtatcccaactaagtgacagagctgagacagttaagttccaggacaagtgtgttgatctctgtacccacttgtgccaggtgcctggggaggtaggggcatggctgtctgagggtggaggggtgagtagggggcctgcagtgtgctgtgacgcctgggaaggggattctaagccatttcccatcagccrtttactaagtagcctggggatcttgttaaaatgcagatcctgatagattagggctggggtgctgcccaagattctacatttctaagagtccctggatgacggtggcattcacagaccacagcttctatgtgagggagagcagttgggtttctgtctgcctgccgcacctgatcagtagttagtgcctgcatgtgtggcggccagaattttacttggggagacgctcggctcctagcaccctctgtggtaggggttttccagagtgtgggcattaccccaactgtctctgcagacggcttcctgcatgtttcccacaagcgctcagatggctgaattggcaagtctgtggtgctrctctttggggccacctcgttctttgcctttccctccccttagcgatgtgtcccatccgttgcctacagtcaagtcagtccacatgtttaggctaaggtgggcatgaccgagtggccttcccccgggaagaccagtgtcgtaactggaattaagttgtggaacnyaagagtcaaggctcgtgtctgctgtgaactggagttgagggaatgtttggggatcccacctggtatcagtaagggaaccayggcgacggccagccttgcccatgtgaggcatttgctttgtcaggccttctcagtagtggagaagggaggaaggagaatgcagctctttcagtgctgtctagcagtgcccaagagccgtgattgggcacctcacttaacgtctaacttcagattcactcttgggcattcctgtcttcctctccaatcttgaatggatgttggcttcgataatgtcatcctgaagtttctttgtccacacagccctggctggttgttaataagctgttaatgcagccttgcactcaggaagccctgatgtttaaaggaactgtgtctttgttcttcctctcttccctctttctcttagtcccactttatctcttctttctcttcctctccctcctccttttcccctctccctcctactctccccctttctctcctccttctctaagaaacccagtcttaattccacacaatgcatgcacatgcagtagcttctctgcttgagtgagctggtgtgattaggttttctaaacatgcacattggccttgctacttgtccttttattcccttcccacagaccataaaccaagaattatttttatttgtattattttgatttttttaaagtaaaatattaacttttcctctttgaaataaattcccatttggaacatcagcatacagtttgaacatttattcgcctcctgagcttgtacaacagtcgtgggagttgctgcagaagcaagcgaaaagccagatgagcgcttctaaacttagagagaggtgagtaaggcttgtgggcgatcacttgtcggctggggcctctggaaagcaagaggttgagtaagaatgctgggtgcaccgtcctgctagtgcttttcttccacggtggtgagattggaggtgggatgtaatggtgggggttgtggggaagcactggccttggagtcagagggcggcactcaagtgtggactgttgtgccctgggcaagtcacctcaaagctctgagtcttggtttcctcgtttgcacagcggggtgaatgctacccctgctgttccccaggggtgacgggtcaccgccttggtgaggacagtgctttgcagatgtgcaggtgtttctgccacctcaatcagttgggcggtttcttttttttcttttacaaggtgaggggattcaaagcaaaccctttgcttaactcaggaagctctaatatttgaaggaactgcttaacaggctgcagaacctgttctgagtgctattttggcaccaattcctttttgtttgtggagtaaagttacgcagtgaagacggtgtaacaccaaataattgtagactctcacaataggtaaaatagctccattttacagttaaggaagctgaggttcaactgaggccccaaagctagttaatgtactagttcttagaacattctttgaacacaaagactatgatgaactcccttctgagccactcacaaatactagccaaccactatcctgcagatctttgggaaagggaaattagaagttcttttggagaggcagaggttggggaaaactcatcacccacagagtgaactcccatgtggggctgcaaggaaaccgagcaaacccagtccaggcaggactcacctttggcctcttcccagaggatgtcctgaagaaacttccccagggcctggctgtgctgctggtactgaacccctgacagcttgattccaacatcaaagggggcgttgaactaggaggcagggcagggaggacccaggagatgtcagaggtcatgcccatccccatctcaaagggggctctgggctctctgcctctcttcaggagtggagagggagaatggcctttgggccccagcagggactgctgagtgacacctcagccaggttctcttcctttctcaggaccacagctcaccttcccactcaccatctttcagacacttaccttgcactctcatgcctctcagccttagcctctaatgggattgctgataaaagctgtggtgccccctagtgtgagattttttttctcccttgcagttttgaagacaaaaggttgagtcaccaatggcagcatttcaggccctggcagggggtctgcccagcattctcagcactggcctgctggccttctattccttccctgctcccagctctttctcctttctctcttgtctgtttcttctcctttttctccttccctaggtattttttctctcatatgcatagacctttctttgatgcctggaaaatcaaaaggaagttgatgttttcctagaaagaggctctgagccaagtcctttctgtgcttccatttcttcccctctacagggagagcgcctcatctcttccattttccaggtattcctgagatgatttattggagctcaaagctttgggtaagtgggaaggagctctgctgcagccacatggcagactttccttgagagcagagattgtctctgccagtggctacctcggtgcctggccatattgggcactgacttatctgagtcagggaaggatcttagtgctgggtcatttggtcctcacagtagaagcccaaggagttggaggccaaggactagaatgcaggacttttaaacccacttggccctgaaaactgctttagtcctattgcccttcctctgtgtgaggccaggcgtcctcagtgcctccctgtggggtaggcgctaccactgtgcccattttacaggtgaggacagaggcgcagagaagctattaaccaatagctatgcgttcccttttcgaaatctccctccccttaactccaccatgaaggtggacccagtggggaatgacatgattgaatttttttttttttttttttttttttttaaggagagttggggccttccattccctccagtaaatacttgtttttcttccaccgctgaggcaaatgcggggtggctgatcacctggcagacatcttaggaaacaggagcaccggtctgggaaactgctggcctggcctaacacctggcgctgtggtgcaggcaagtgagtggtgacacagtgctggctggtggggggcagcttccctcctggcctcagtggcccatctgttcaatgggagtgggacttggtctccaaagtcttctactctgaaacttgattttgggagggaaacgtttggggggaggtagaggggcctgagatgagagaggtgggtgggacactcggttgtgaggggtttggtagtggggcgctccaggtctctgcagccactcctcttctggcagccccaacaccccccaggcgtttgacttctggttccagccaaggcagtgtgggtcacatgctccaaggctagctttcacagaaactgcaaagttcccgctgtaccagccccaccttgcgtcgtcagccaccaagacctctttctcatctgggtactgggcagctcctctggctgggatgaccatgtgtggagctagccgtctcaccagcaaaatatcctggttttggcctaagggtatgcagctctttcagatgagaatctagtggatcccaccgtgtagaggaaaggtctgaacaccgccaggtgctggtgaggatgaaagcgagcaggggctgggggagcttccgacggctttattcctcgactggagaagagtatggtaaacaggcaggcagaggccaaggcgggcacatttcactcctctggaaggaagaggcctcccctgggccactgtgcgctgtctctgtccatcagaccagtgaggaggaagagggcttggggactggagtcagccctgaccttgtgtcgcgtcccttccacacaccgctgtggtaccttgggcaagtgagttcacctctgaactgttccttggctctaaagtgggagtaatgccagccctgcttacctcacaggttgtcgtagggaggaggtggggcagttagaggtgaagttggtatcctcgggcacagcgtctaatagctgccattattaagtgctaccttgggggaatcctgccttagctgcgaaatggtgtcaccaaccaaatatttagaagaaaccattccctgaaccacagccacaggaaggttgcatagaaaaccccgtaaaatcctttactccctcctcctctccatccttgggttgtcttaactttctccttgccccacgcacgatttgtcagagcacatcacccacacctgccccctccttgcctccaggcgaggtgagtgggtgccggagcctgggctggcgccagccctcccatccagggtgctgttcggaagcactccaccccacagtccaggccctggaagcccctgagtaaaacatggttttctgcagagcaacatcttcagtctgggcctgccgtttatttctgggtgtctttgtctctgggcactgtattttctgtcccctttgagtcgcctggaggctctggcaccctctctcctctgcccaggctccttccgtccctattctgttgtagcaaagttacttcttctagatatttttctcttaatgggtaaagacctcacagagcccagggcagagctcaactcctgtggtactggttttatagttctggggagcttgtagttgggaccctgttcactgccacctctccctgccctccctctcccctgaccccaccctcctcgctgccacagaagcataaaactgcagaggtaccgacccggacttccagttcatcctctgccccttctgcttgacctccatcttccgggcggagccagcctgctagagctcggggctgcagcttggctggtggcttcttcgactcctttctctgctggaagggggaaacagtctgtttaggactctaagcccccatgtccttccagaaacagtgaggtcagacccagagtcctttgtgctctgggagaagactgaagcccagagatggcgctgctgctccaggtcacagagctggttgctaagtggcagggctggaacaacatgtggggctttgtggggaggtctcacctggactctctggtgttcagggctcaggaagctggagcctgccatggccaagtccagccagagcatgccgaggagcaggaggctgcagacggtccctggggagggcatggcctcagctgggttgcagacaggtgggcctgggggagagagggtctccaggcagctgcctccccttctcatgtgcctctgagcttgctcaggtaggagcccagcagatggcgtgaagggctttaccatctggggtcctgactgctgtgtagagaggacccccgcttccacctcccaaggtagaagatgatggatgtgtgttctcttctccaaggccgttcagggcagaacacctggcagcaggacttgataggggctgggggtcctccccggtgccttttgtcccaggctctgagagctcatggcgagtcttttcatgaggagggaggaagctgaaccagcaagggccccagggcactcagcagggagggggttagaggtagctcctaaatgaagctctgtcttccagccagacagtccgacatcccccgtgtttagaggggactcctgaggcccagagaggttaaacggacgggcagcagtcacggacaataaacctgtcagcaaacgcacacggagagtagagagagcttacctgcagttcctggcggaggtggtgcctggtggctgtcaggtccttatataggatgactggcgtttgttctaaaccagcaaccccatcccagaggtggcctagcttccgtggggctgatgtacattccttgggaactaaaaatgttcttgtcctctgggtagaagtcaacagtggaggtcagatgccctgcggaattgctgggttggcgagggaagaagcatgtgctccagctgtccctggaacacggtggcggggtgccccaagtgggcatggccctggtggaggagggagggaggagagtggctctggggtctgggtgcagctttgttgctgtgtgaccttagcttactcgccctttctccctgggtaaaatgaggctgtcatcactaggagagctctgagacctccccagtccagcgccccgttgtttcccatgtgctgttgctgctctggcctctgtgagccccgggagtccgcagggagccaggctggtgattctacaccttcccgaggaggagtcccacctcccggttgagcagactgctcctgatcatcctctccagagagtgggtgtggggataacttcagccagtggctatgcttcagtcatttctgccaggtgtgacatgactgcctggcctggcgttttttcacatagcagcttgccttgcctccctccagcagctttggtccctattttagcggatgcctcttctgagagggaagtgcattggacctggaggtggaagatctacgcttagcacgggcctggctcctctctcattgactggccttacgccgaccacaaataattccccttacccagagtctttgagggtgaaatgaggcgatggggggaaagtggcttctaacctgtgaaacaccctgcagatgacaatggtttcataccaggcccataggacttcccagcataggccaaggccactgcctcatttccctcggccccaggaatttcttcctttctggagtgcttcatccaactgggtgcccaggcaggaacccctaagggcc
